United States Patent Application Publication US 2023/0407243 A1 - sequence listing, part 3

SEQ ID NO: 255 - DNA, 4631658 bp, synthetic construct (residues 3,087,773-4,631,658 of 4,631,658)
  source 1..4631658: mol_type = other DNA
gcgccacgcgtccttcctgtttatccacttccagcttttgtgacagcactgcccgtaaactacctgccagttgattacgcacggggtctttttcctgcgccggaaatgaatccaccagtcgctcaactgcctgcgcggcaccacgcgtatgtaatgttgccagcaccaaatgcccggtttctgccgccgtcagtgccagacggattgtctcgctgtcacgcagctctccgagcaaaatcacatcaggatcttcccgcaatgcggcccgcaatcccgatgcgaacgtcatacagtgcaaaccaatttcccgctgctggatcaaacatcgctggctggcatagagatattcaacaggatcttccagcgtcagaatatgcgcatcggcatgttgattgagatagccaaccatcgccgccagcgtggtagatttgccactccccgtcgcccccgtcaccagaatcaggccattctcgctcttgagtaattccggcaataccgttggtgcgccaagctgttcgagctgcgggcagtgcgaaggtaacagccgtaacgccagcgaaatgccatgccgttgcgcgaatgcgctgccacgcaatcgctggttttccgccagcgacacggcaaaatccagctgaccattctccagcaatattgcccgctgatcgtcatccagccactcccgcagtagctcttcgacgtccggcgtatcaaacggcgcagcttccattctgccgcgaatgcgccatcgtgcgggccaggcgctgcacaggtgtagatccgagacgttatgctttacactaagggccacaatttcttccatattcatactaagatcctcggaaaatgaacgatattgcgcataacctggcacaggtccgggacaaaatctcagcggctgcaacgcgttgcggccgttctccagaagaaattacgctgcttgcagtcagtaaaacaaaacctgcgagcgccatcgcagaagccattgatgccgggcagcgtcaatttggtgaaaactacgttcaggaaggggtagataaaattcgccactttcaggaactgggcgtaacaggattagaatggcattttattggcccgttgcagtctaataaaagccgcctggtggcagagcatttcgactggtgtcataccatcgaccgtttgcgcatcgctacccgtctcaacgaccagcgcccggcagaacttccccctcttaacgttctgattcaaattaacattagtgatgaaaacagtaagtccgggattcaactggctgaactggacgagctggcagctgcggtcgctgaactaccgcgtttacgtctgcgcgggttgatggcaatccctgcgcctgagtcagaatatgtaaggcagtttgaagttgcacgccaaatggctgtagcatttgccggactgaaaacgcgctacccgcatatcgacacgctctctctgggaatgtcggacgatatggaagccgccattgcggcaggtagcacgatggttcgtatcggcactgcaatttttggtgcgcgtgattactctaaaaaataaggaattaaaggaacgccatgaatacgttgactttcctgctttcaacggtcattgagctgtataccatggtgctgttattacgcatctggatgcagtgggctcattgtgatttttacaaccccttctcacagtttgtagtgaaggtaacgcagccaattatcgggccactgcgccgcgttattccggcaatggggccaattgacagcgcctcgctgctggttgcctatattctcagttttatcaaagccatcgtgctgtttaaagtggtgaccttcctgccaatcatctggattgccggtttactgattctgctgaaaaccatcggcctgctgattttctgggtcctgctggtgatggcgattatgagctgggtaagccaggggcgtagcccgattgaatacgtgctgattcagctggccgatccgctgctgcgcccgattcgccgcctgctaccggcaatgggtgggattgatttctcgccgatgatcctcgttctgctgctgtatgtcatcaatatgggtgtcgcagaagtattacaggcaaccggaaatatgctgctgccagggctgtggatggcgttatgaatgccgtaacagttaatgatgacggtctggttttacggctctatattcagccgaaagccagccgtgattctattgtcggtttacatggcgacgaagttaaagtcgccattaccgcgccgccggttgacggccaggccaacagtcatctggtgaagtttctcggtaagcaattccgggttgccaaaagccaggtggtgattgaaaaaggcgaacttggccgccacaaacaaattaaaatcattaatccgcaacaaatcccgccagaaatcgcggcgttaattaattaggtatcctatgcaaaaagttgtcctcgcaaccggcaatgtcggtaaagtgcgtgagctggcgtcgctgcttagcgacttcggtcttgatatcgtggcccaaacagacctcggcgttgattccgctgaagaaaccggcctgacctttatcgaaaacgcgattctgaaagcgcgccatgcggcaaaagtgaccgctttaccggcaattgccgacgactctggtctggcggtagatgtgcttggcggcgcgccgggcatttactccgcgcgttattccggtgaagacgcgaccgatcaaaagaatctgcaaaaactgctggaaacaatgaaagacgtaccggacgaccaacgtcaggcgcgtttccactgcgtgctggtatatctgcgtcacgcggaagatcccactccgctggtatgccacggtagctggccgggcgtgattactcgtgaaccagcgggcactggtggctttggttatgatccaatcttcttcgtaccttccgaagggaaaaccgccgccgaactgacccgcgaagaaaagagcgccatttcccaccgtggtcaggcgttgaaactgctgctggacgctttacgtaatggttaaattacctccgctgagtctctacattcacatcccgtggtgcgtgcagaaatgcccgtactgcgatttcaactctcacgcgttgaaaggagaagtgccgcacgacgattatgttcagcatctgcttaacgatctggacaacgatgtggcttacgctcagggccgtgaagtaaagacaatctttattggcggtggtacgccgagcctgctttccggcccggcgatgcaaacgctgctggacggcgtgcgtgcgcgtttgccgctggcagcggatgcagaaattactatggaagcgaaccctggcacggtagaagccgatcgctttgtcgattatcagcgtgctggtgtgaaccgcatctctattggtgtgcagagttttagcgaagaaaagctgaaacgacttgggcgtattcatggcccgcaagaagcgaaacgcgcggcgaagctggcgagcggtttagggttacgtagctttaaccttgatttgatgcatgggctgccggatcaatcactggaagaggcgcttggcgatctacgccaggccattgaactgaatccgccgcatctttcctggtatcaactgaccatcgaacccaatacgctgtttggttcgcgaccaccggtgctgccggacgatgacgcgttgtgggatatattcgaacaggggcatcagttattaaccgcagcgggttatcagcaatatgaaacttccgcttacgccaaacccggttatcagtgccagcacaatctcaactactggcgctttggtgactacatcggtattggctgcggcgcacacggcaaagtgaccttcccggatgggcgcattctgcgtaccaccaaaacgcgtcatccgcgtggttttatgcaaggaaggtatctggaaagccagcgtgatgtcgaagccacagataagccgtttgagttctttatgaatcgcttccgtctgctggaggccgcgccgcgcgtggagtttattgcgtataccgggctttgcgaagatgtgattcgcccacagttagacgaggcgattgcccagggttatctcaccgaatgtgcggattactggcagataacggaacatgggaagctgtttttaaattcgctgctggagctttttctggctgagtaaacttgtattgccggatgcggcgtgaacgccttatccagccgacatgtggcagcggttgtaggtctgataagacgcgcaagcgtcgcatcagacgttgattgccggatgcggggtcaacgccgcatcctgctacaaatcgtgcactatatcaaacttacttaatcaccccattgcgccgcagttgttcggtatcttttttccagcgttcattagcttggttgatatcgtcaattttcatcaaaatcgcgacttttttactgtttatttctgaaactttcatcgttaacggatattgccctttttcgagcgttacccagtcatcctgcaatttacggctaagtttttgtgattgcagaaaagtctgtcgccgttgttcgttgatatcgaaatctcgtttctgctgaatcggcacttcataacactcttcactctgtttatgacatgccgcaatcgccggttgataaacctctttgtcatatttaaccgcgaacgcctcgctatcgttctgtttattaaactcatcacgctgttggtgaatttttttaaaggcgtcttcgcgggtcatttgcttaccgtttgcatcttttccccaatatgcatccgctgctttctgcgccgccaccatttgcttatcaagcgctttcacttccttttccagcgcaggaatcgagttcttctgggtattcaacgcagattcaagctgactaaagcgataattgaaatcttcgctattcacgatcagatatttattattcgttttgatatcgtcgaccacccgcccacgatcgctggctgccgcctgaaaagagtaaaagttcaccgaccagccagacgcgggcgttcctttactggttaacatcgccgagaattttaccggtttatctttcgtccaggtctgttcgagcagttcgtaatctgccaactgaccgacccaggtatagagatcgtcactggaagagacatcgccttccgctgaccaggtggcctgattacccttagcatcaagattttttaaggtgatagcatcaagcttgagaatgccgtgatactgctttttgaattgatcttttaagatattttcagttggcggttcgccatctgcccaggcattaccagtcatcaacataagcagtgccgtgccaacaatccattgctttttcacccgaaaaacctcacgcggaataatttattccggtgattatcattagggtaattaaaattggcaatggacgtgagtctgaagtgaaaaagccccggcacgataccggggcgaggcgattagtactgattgaagatctgctggatctgctgcggatctttggtttgcgtcagagccagttgcagcagaacgcgcgctttttgcgggttcagcgtgccagaggcgacgaagccgtatttcgcatcatccacttcggcatcctgagtggtagcgcccgtcggtacgcgggaagaacgcacgactgcagtaccggttttcgcggcggtcgccagcgtgtcgaacacagatttatacaggttgccgttacccacaccagcgctaacgatgccatcatagcccgcatctaccagtgctttagccggaagatcggatgcgttagcgtagttataaacaatgccgactttcggcagttcattcagcttagagacatcgaatggcgtgtcgctggtatgcttacgtgccggggtacgctggtagtcaatcttaccgttgtgaatgtaacccagaggaccgtagttaacagacttgaaggtcgctacgtcggtggtgttggttttggtgacgtcacggccatcaagcacggtgtcattcatcactaccagcacgccacggttggcggaggctttatcagctgcggtcactaccgcgttatacaggttgaatggaccgtctgcgctcatagacgtggacggacgcattgcgccgaccatcaccaccggtttgtcgcatttcaccgtcaggtcgaggaagtaagcagtttcttccatcgtgtcggtaccgtgggtaatgacgaagccgtcggtcttatcgcagtcggtgttaatttttttcgccagtgtcagccagacattatcgttcatgtcctgggagccgatattcactacctgctcgcctttaacgttcgcaatgtcttttagttgcggcaccgcattaaccagattttctacgccaactttacccactgtgtagttagatttggttgcggagtcaccaccaccggcaatggtcccgccggttgctaaaatggtgatattgggtaatgccaatgctgcaccactaaaacccataaccagtgcggcaagtgccgtctttttgaaaaactccatttcattcctccagttacgtgaacgctacgcattatcccttagctctgtatgggaaatttgacgttaaacaatttacaacgtgaatatattttggagatctacaaagttagaggcaggtaacaaaacgaagaattaaacggcataaaaaagtattatgccgtcttaaaatagaggattattttaaattcccgaccagggctttgcggctatcttccagagtcacaacgcggctacaaacatctttgccaaactgctggaaatctttttcctgctttttccactcggtttggattgaggattgcagcccccccaggcttcccagcacattctgtaatgggttaccgccgcttttcagcaccgctttcgcgcccatttcattaatgctgtcctgtaaaattccacccattgcctgattcactaattgctggccttcggcgcgaacctgatcaatggctttatagtgaaacgtcaggccatcgctgcgcgtttcaataatgcggttcatctgctctttcagctgcgcatcaagtttggtcagacggctgcgcattttgctgctttcgcccatctcctgaacgataattttatccagagcaatacgggctttctcgacgcggcttttcgcgccttcatcaatccacggcagcgtgctgcgtagttcagcctgataatccttcgcctgctcgcgctgggcggcattcagggaatattgcttaccgttatacatcacgttgccgtctggcgtgatcaccagattgccgttttcgcccttcacctgcacggtttgcgggctgacaatcacatcgtcacgcggcgtgacgctgcactggtagtcggcgtgagcggtcattgccgtcactgaaagtgctgccgccagcagcattttgcgcatcatagtcttccctcaagaaaaaatcaggccagcatttgctggccccagattgataacaaagtacgcgttttccatgccggatgcggcgtaaacaccttatcccgcctactcgatcgtgcatctttccaggcctgataagcgtagcgcatcaggcagttttgcatttgtcatcgcccgtatgctttcttagtcccaccaaacgtcgaaaagttcgctggtgcgtacctcatccagtttgcgctcttccagccacttacgcacaatcgcctgatgttcttcggtgcatttgccgatttcctgcatgcagatcagaccttcccaggccagataaccgctgccgtcaaaggccagtttgttcggttcgataacctcgttaataaaatcatcaacggttttatcaatctgttcttccgatgtaccttccgggaatcgccatgccaccgaaaatcctaattcctggaattcgtcgatgtgcatttttttacgcagacgacggctacggttctttgccattatttcaccctctcgaacattaagtcccatactccgtgaccaagacgatgaccacgttgttcaaatttcgtcaccggacgtgatgccggacgcggtacgtaatcattgctctctgacaggtttttataaccgtcaatagaagacatcacttcaagcatatgttccgcataaggttcccagtcggtcgccatatggaatacgccccccagctgcagtttgctttttaccagttcggcaaacggcacctgaacgatacggcgtttattatggcgcgctttgtgccacgggtcagggaaaaagagctgcaccatgcgcaatgaattgtcaggaatcattttatgcagcacttcaaccgcatcgtgacacatcacgcgcaggttgcttaaaccttcttcatgcgcagaagccaggcacgcaccaacgcccggtgaatgcacttcaatgccgaggaagtcctgctcagggcgatctttagccattgccaccagcgacgcccccatgccaaaaccaatctcaagcgtcaccggcgcttcacggccaaaaagcgcggggaaatccagcatatcttcgctgaactcaacgcccatcaccggccagtagttttccagcgcatgttcctggcctttggtcagtcgcccctggcggcgcacaaaactacggatacggcgcagtgggcggccgttttcatcaaattccggtgaaatgacgtcgtttttcataaaggtttagtcgcttgtgaaagtgttctgaaaacgggcattatccaaagttagttgccggatgcaagcatgataaggccgtggctgcggaaagttccggtttacaccctgccgtcgctgtgctgcaatcttgcccccaacaacagtgaattcggtgaccatgcaagcgtcgcaattttcagcccaggttctggactggtacgataaatacgggcgaaaaactctgccctggcaaattgacaagacgccctacaaagtatggctctcagaagtgatgttgcaacaaactcaggttgcgaccgttatcccctattttgaacgctttatggcgcgcttcccgacggtgaccgatctcgccaatgcgccgctcgacgaagttctccacttgtggaccgggcttggctattacgcccgcgcgcgcaatctgcataaagcggcacaacaagtggcgaccttacacggcggtaaattcccggaaacctttgaggaagttgcagcactgccgggcgtcgggcgttccaccgcaggcgcgattctctcgctttctctgggtaagcactttccgattctcgacggtaacgtcaaacgcgtgctggcgcgctgctatgctgtaagcggctggcctgggaaaaaagaggtcgagaataaattatggagtttgagcgagcaggtgacgcccgcggttggcgtggaacggtttaatcaggcgatgatggatttgggtgcgatgatttgtacgcgctcgaaaccgaaatgttcgctctgtccgctacaaaacggatgtattgccgccgccaacaatagctgggcgctttatccgggcaaaaaaccgaaacagacgctgccggagcgcaccggctactttttgctattacagcacgaagatgaagtattgctggcgcagcgtccgccgagcggattgtggggcggtttatactgtttcccgcagtttgccgacgaagaaagtttgcggcagtggctggcgcaacggcagattgctgccgataacctgacgcaactgaccgcgtttcggcataccttcagccatttccacttagatattgtgcctatgtggcttcccgtgtcgtcattcaccggctgcatggatgaaggcaatgcgctctggtataacttagcgcaaccgccgtcagttggcctagcggctcccgtggagcgtttgttacagcagttacgcactggcgcgccggtttagcgcgtgagtcgataaagaggatgatttatgagcagaacgattttttgtactttcctgcaacgtgaagcagaaggtcaggattttcagctgtaccccggcgagctgggaaaacgcatctataacgagatctccaaagaagcctgggcgcagtggcagcacaagcaaaccatgctgattaatgaaaagaaactcaacatgatgaatgccgagcaccgcaagctgcttgagcaggagatggtcaacttcctgttcgagggtaaagaggtgcatatcgagggctatacgccggaagataaaaaataaaaacagtgccggagcacgcctccggcaacttgcataaaaacaaacacaacacgcacccggaatgatgaaaaaatatctcgcgctggctttgattgcgccgttgctcatctcctgttcgacgaccaaaaaaggcgatacctataacgaagcctgggtcaaagataccaacggttttgatattctgatggggcaatttgcccacaatattgagaacatctggggcttcaaagaggtggtgatcgctggtcctaaggactacgtgaaatacaccgatcaatatcagacccgcagccacatcaacttcgatgacggtacgattactatcgaaaccatcgccgggacagaacctgccgcgcatttgcgccgggcaattatcaaaacgttattgatgggtgacgatccgagttcggtcgatctctattccgacgttgatgatattacgatttcgaaagaacctttcctttacggtcaggtggtggacaacaccgggcagccgattcgctgggaaggtcgcgcaagcaacttcgcggattatctgctgaaaaaccgtctgaagagccgcagcaacgggctgcgtatcatctacagcgtcaccattaacatggtgccgaaccaccttgataaacgtgcgcacaaatatctcggcatggtccgccaggcgtcacggaaatatggcgttgatgagtcgctgattctggcaattatgcagaccgaatcttcctttaacccgtatgcggtcagccgttccgatgcgctgggattaatgcaggtggtacaacatactgccgggaaagatgtgttccgctcgcaggggaaatccggcacgccgagccgcagtttcttgtttgatcctgccagcaatattgataccggcaccgcgtatctggcgatgctgaacaatgtttatctcggcggaattgataacccaacatcgcggcgttatgccgtcatcaccgcctataacggcggcgcaggcagcgtgctgcgagtcttttcgaatgataagattcaggctgccaatattattaacaccatgacgccgggcgatgtttatcagacgctgacgacccgccatccctctgcggaatctcgccgttatctttataaagtgaataccgcgcaaaaatcctaccgccgccgataattccattaaccgcccctgacgatgctcaggggcaaaaatgttatccacatcacaatttcgttttgcaaattgggaatgtttgcaattatttgccacaggtaacaaaaaaccagtccgcgaagttgatagaatcccatcatctcgcacggtcaaatgtgctttttcaaacactcatccgcatcacgatgtgaggaaattaacatgaatcttaagctgcagctgaaaatcctctcttttctgcagttctgtctgtggggaagttggctgacgaccctcggctcctatatgtttgttaccctgaagtttgacggtgcttctattggcgcagtttatagctcactgggtatcgcagcggtctttatgcctgcgctgctggggattgtggccgacaaatggttaagtgcgaaatgggtatatgccatttgccacaccattggcgctatcacgctgttcatggcggcacaggtcacgacaccggaagcgatgttccttgtgatattgattaactcgtttgcttatatgccaacgcttgggttaatcaacaccatctcttactatcgcctgcaaaatgccgggatggatatcgttactgacttcccgccaatccgtatctggggcaccatcggctttatcatggcaatgtgggtggtgagcctgtctggcttcgaattaagccacatgcagctgtatattggcgcagcactttccgccattctggttctgtttaccctgactctgccgcatattccggttgctaaacagcaagcgaatcagagctggacaaccctgctgggcctcgatgcattcgcgctgtttaaaaacaagcgtatggcaatcttctttatcttctcaatgctgctgggcgcggaactgcagattaccaacatgttcggtaataccttcctgcacagcttcgacaaagatccgatgtttgccagcagctttattgtgcagcatgcgtcaatcatcatgtcgatttcgcagatctctgaaaccctgttcattctgaccatcccgttcttcttaagccgctacggtattaagaacgtaatgatgatcagtattgtggcgtggatcctgcgttttgcgctgtttgcttacggcgacccgactccgttcggtactgtactgctggtactgtcgatgatcgtttacggttgcgcattcgacttcttcaacatctctggttcggtgtttgtcgaaaaagaagttagcccggcaattcgcgccagtgcacaagggatgttcctgatgatgactaacggcttcggctgtatcctcggcggcatcgtgagcggtaaagttgttgagatgtacacccaaaacggcattaccgactggcagaccgtatggttgattttcgctggttactccgtggttctggccttcgcgttcatggcgatgttcaaatataaacacgttcgtgtcccgacaggcacacagacggttagccactaattacgcaaagaaaaacgggtcgccagaaggtgacccgttttttttattcttacttcaacacataaccgtacaaccgtttcacgccatccgcatcggtttcgctataaacaccttgcagctccggcgaaaatcccggcaacaaattcaccccttcttccagtgcaaggaaataacgttgaaccgccccaccccagacttccccgggtaccacgcaaagcacgccaggtggataaggcaacgccccttctgccgcaattcgcccttcggcatcacgaatccgcaccaactccacgtcaccgcgaatataagcgctatgcgcatcctgggggttcatcaccactgacgggaaactctgctggcggaacatcgctttttgtaggtctttgacgtcgaaactgacatacagatcgtgcatctcctgacacaactggcgcagggtgtagtcgcgatagcgcaccggatacttgttataaacgctcggcaacacctcaaccagcggcgagtcatcctcaatatgctgttcaaattgcgccagcatcgccaccagttgtgccagcttctcgtggctttccgccggagttaataaaaacagaatggagttgagatcgcacttctccggcacaatgccgttctcacgcagatagtgcgccagaatcgtcgccggaacgccaaagtcgctatattcgccggtttcggcatcgatacctggtgtagtgagtaacagcttgcacggatcaacaaaatactgatccgcggcatatccttcaaagccgtgccacttcgcccccggctcaaaactgaaaaaacggcggtcgctggctaacactgatgtcggataatcctgccacaatttgccatcaacaacgggcgggataaacgggcggaacagcttacagcgcgcaagaatagccttgcgcgcttcaatccctatctcaacacactcagcccacagccgacgcccactctccccttcatgaattttggcgttaacatccagtgcagcaaacagcggatagaaagggctggtagaagcatggagcataaaggcgttattcaaccgcttatgcgggcaaaaacgcgcctgtccgcggatatggttatcttttttatggatctgcgacgtctgtgagaatcccgcctgctgtttgtgcaccgactgagtcacaaagatccccggatcgttttcgttaagttctaacagcagcggcgagctatccgccatcatcgggataaattgttcataaccgacccacgcggaatcaaacagaatgtaatcacacagatgcccaacggtatcgatcacctgacgggcgttatagacagtgccgtcataggttcccagctgaataatcgccaggcgatacgggcgcggcaggtcggctttttctggcgcaacgtcgcgaatttgctggcgcagatactcttcattaaaacagtgcgcatcaataccgccaatgaaaccaaacgggttgcgtgaagcttccagatagaccggcgtcgcccccgcctgaatcagcgcgccgtgatgattcgacttatggttgttacggtcgaagagcaccagatcgccacgcgttaacagcgcattcgtcaccactttattcgctgccgatgtgccgttcagcacaaaataggttttatcggcatgaaagactttggctgcgaatttctgcgcatctttcgccgatccttcatgaataagcagatcgcccaattttacgtcagcgttacacatatcggcgcgaaagacgttctcaccaaagaaatcgtaaaaatggcgtccggcaggatgctttttaaaaaacgcaccatgttgatgtccagggcaagcaaaggtgctgttgcccatctcaacgtactgcgtcagcgtgtcataaaacggtggcagcaaattctcttcatactgacaggctgcggattccagctccagccactgctgctcgttgccgttgattaccgccgtaacgcccgcaggtaattcaacagcatgttcggaatacaaaaacaccggtagatgaaaaccggtgcgcttaagcaacgcaagaatgccactgcgactatccgcagcggtaatgacgactgccgcgacgtccgtaaaatcagtatctcccaacgccaccacgcgacgatgagaagaaagtcgggataccagttcactactggcggcaatattcattgatttcataagcgcaaacccgtttcggggaagtaagaataccggacaaggtggaaaaccctgccccatgagatatgggtcaaactggtcaccagctccgaccgccagacatcagtaaaagcagaaacgctctgattttactgttgtcctgcagtgagcgtgcgttaacttcaccgcatgagcagtaacatagaaagggaaacgtttcgcgcgaaacggcgataagcgagagaatgtaaggagatggcgtgcatcgggcaaactccgtacagagaggagaaaattcgcgcaatcatggcacctttcgctaaagcgtgcaagccaggactttgcgaacaaacaagccatcgacggcaccaaacggtcataataagaaaatcaaacaatacagctaacaggaactcttgtggtcatcggcccttttatcaacgctagtgcagtcttactgggtggcgttctcggcgcactgctcagccaacgcttaccggaacgtatccgcgtctccatgacatcaatttttggtctggcatcgctggggattggtattttactggtggtgaaatgtgccaaccttccagcgatggttttagctacgctacttggcgctctaattggcgaaatttgtttgctggagaaaggtgtcaatacagcagtcgccaaagcacaaaatctgtttcgtcactcacgtaagaagccagcgcatgaatcttttattcagaattatgtcgcgattattgtcctgttttgcgccagcggcaccgggatcttcggggcgatgaacgaagggatgaccggcgatccgagtattttaatcgccaagtcatttcttgatttctttacggcgatgatcttcgcctgctcgctgggtattgcggtatcggtgattagtatcccattactgatcatccagttaacgctggcgtgggctgccgcgctgattttaccgctgaccacaccgtcgatgatggcagacttcagcgccgtaggcggtttattgctgctggcaaccggattacgcatctgtggcattaaaatgttcccggtggtcaacatgcttccagcactccttctggcaatgccgctttccgccgcctggaccgcctggtttgcctgacaatgcgtgcaatatcggcaaagtgatgatagattgtgcagtctgcagtaaattgaagaaatttgattgacgagacgaggcgaatcaggtttaatgcgccccgttgcccggatagctcagtcggtagagcaggggattgaaaatccccgtgtccttggttagattccgagtccgggcaccactaattcttaagaacccgcccacaaggcgggtttttgcttttggatctgacaataaccttcacgaaaaaaattagcttataaagtctgggggaattactctcgccacgttaacgagagtaattttattgatattaatctcctgatactttacccccgtccaaactccagccgctgcacattcaccatcccaggcttctcagcagcactgacatcaatttgtgtcacccgcagcgcatatttttcatccagtgcgtttaaccatttcagcaggtcattaaacaccacaggttctatccagacctgaatattctccccacgatcggctatccgcctgatgaccaccgagtgcgcggaagcactgtcactgatgacccgcgatacctgcgcaggcgttgttgtggcagattttcgcgctgcaataatatccggcgcggcgttcttcagtcgggtgttcatcgccaccagctgctgcaatattgtctcctgttgctcaatccgttcgctcaacggctgccagatgaggacgtaatatccgacgctaaacaggaacaccaccgctgccagtaacatgcccttttcacgcggagaacgccccgccaggtgttgtgccagccagtgttcgccacggcttaactggcgttcacgccattgctgaaaatagtgaataaatttatcgcgtaacatgttatttcctccgcaacgttacgccgccggaaaccgcatcaccctctttctgtaacgcgtcctgttgcacaacataatcggttgccagtacactacgcagtttgtcgaaactggcaaagttcgcggcccgtagctggaggtgaagtatctggcgtttttgatcaaaggtaaaaccacgcatttcgatgtcggaaagtgacgctgatttcagggtgctggctatcgctgacaactcggcgagcagccgggtatcgtcggcctgtgggcgatattttttcagcgccatcgtcacctgagagcgtaaattcacaatccgcttctgctccgggaacaacgttaagaactgttcctccgcctgggtgcggctttgcgccacctgttcgctgacgctccataacgtcacgccccgctccactgccagcgcaaccagaatcagcaatatcggcagaatcatcacccgccagcgcgcccactgttttcggtagctgacgcgaggctgccacggccctgtcagcaggttcccttccggttcgccataagtggtaatggcgggcagagctgtaacggtcaggcgttcagcgtctgcgccagcccatgctgatagcttttccggtgcaatgccgactacggttagcgaaagcggtaaatcctgctcattgagctgggcgcggaacatgaccggagccagcgccagcccggcgctccatccccggcattcatcgatgcggcagataacccgttgcgcatcgcaagccataaacccacaaggaatggacatccagtccggcgcgacggtagcgcgggtgatgccgttttcctgcaaccactgcgcaatgttgcgcatatgctgttggtgaatcactgctacggttgccagttgctggtcgatattcaacggggcgaaatgcagttcatcgatatcctggttcagctcttcttccagtaaggcgggcagaatagtcggtagcgcagcgcgatggaaatgtcgtggcgcgcacccttgcgtaaaaccgtaagttgaatggaatccattgaaggtaactgccgcatcagagcaatcattgctcgtggatcagtgaaatcctgctgatttagcgcaatggcgatatcgccttccttgaaaccgctggcatcgaacagagaacgatctgcccccggcttcgctgcataaccgacaatcccctccttacgcacaggcgtaagctggatatagttaaaaattttctgcggatctttcgccagtgcctgacgcacggcagccgggatctcaactggcacactgacagcaggctcagcaacagcttgctttgcttcgtcactgacggcttttttgttggtcacagcaacagtggaacgttcctcttctgccagactcagacgctctatttttccctgataacgcagcatcacatggtcgcggttgatttcctcaatcaccgcgttgtgagagccaagcgtttcaccctgcaaatagacctgctgtttaccgccttcttcaataaccgcgccgggtctggcaccaaaggcgatcccacgcagcaccacattaagacgcgtttctgccacaggcacaggttcgggttgttttacctgcgcggcgacaggctgatatttgccaaaccagttttgctggctgattaattgcacgtcatttttatcgaacgtttttgcatccacacggctcggtttattcaccggttgagaaaccgccgtatattccgcagaaaaggagatatagcgccagagtgaatgcgccatttttgcagaaataataagcagcatcagccagaacatcccgcgtgcaatttttcgcagatgctctttgtctgtattaagagattgtctctggttaagagtgtgacgaatttttgtcagccattgaatgagataaattcgtgcgtcacgaaaaacaacccgcgccaatttatatctacccgacgttatgctttgactattccacaggtggtacgatccagtttccgctgatactggttacctgtacgtgtatcattaatcgttatgctgtaattaattccctcagtgatcattaatttcaccgtcgggtcagcgcacatttgtcgttgatagctggttaaaaaggcgtcaggcgtctgcgtggtttgtgtacccgcttcgctgataatggtcatttttaccgttgtgccgctactttgcgccagcactaaggtatatcccgcagatttaatcggcaggttttggctgatattttgcgcctgttttttcgccagtaaactggcattttcattatggctggcacagccacttaataatcctgtaacgctcaacaatagcgatattaataccctccctggcatttgttttatcgacatggtaaataatctctaaggttattaataagagttaaaatgtcactttgataatgacgtggttatcattaaaacaatgcctgtagataaagtgttgctataccgcccagacttaaacacggtccaaaaggcagtgtggttgatcctctttttgtaataacggcatatatcaggccgcagcatgaggcgattaaagcaacattgggcagcgacaatgcccccacccagccacctaacgcggcgaaaagtaatacatcgcccatgcctaatgcttctttacgcagaactattccggctatccaacgcagagagtaaaaagtgataaatcccaccaggacgccggtgactgcatcttgtagcgtgagcggactctgctgcgcccatgccgcaatcagtcctgtccacaatacgccctgagtaaaaacatcgggcagccattggtgatcgaggtcgatgacactcgcggcaatcagccaggcggataatatcatcaccgccagcccccatccactttctggccagaccagactcgccagcaaaaaagcaagtgctgtcaataactccaccagcggataacgcttgctgattttcgcctgacagtcgcggcagcgccctttgagcatcagccaggagaacagcggaatattgtcacgtatccggatggtctgctgacaatgtgggcagtgcgaacgcggtagcgcaaggcttatttttgactgcgcactcgacatttcaccgtgaaactccgccatttgttggcgcagcatgattgggtaacgccaaatcaccacattcaaaaaactgccgatgatcaatcctccgacggttgccaggacgggcatcgccgtggggtattgctgaaaaacatcaaaaagcatggttaaaggttgtttgttgtaacttgctggatgcggcgtaaaacgccttatccgtcctacgggtgtctgccagcgcaaataatcgcggctttccccgtctgtaggcccgataagcaggcgcatcgggcaaatgtgttaacccggtgcgccttatttcatgccggatgcggcgcgagcgccttatccggcctacgggcttactcggcagacatcttatgctcggtaacctgattaatggtttccggtccctgttccggtttcggcagatcgagtgacgcgagcgtgttgtaagccgactggctcacaccgccctcgaagctcatctcgctcgcccccggcagctggtaagcattcgcgcccggattccatttcttaaagaactccgaaagatccgtctgggcgacccaggaggcacacagcatcagcgtgtccgctgcgttaccgttggattcagcacagtaattcttgccgccaaacttgtcattgctgacctcatcgccgcgtgctttacgatgcatcaactggaacaggttccagcctttcatcccttcacgctcgctgtaaaactctggcagaggagtgccatctggataccatttcttgatatcaaagtttttctctgcccattccttcagctgtgcgtacatcagcagacggtcacccgcaccgccgcgtgcccatgcctggttgttgctctcctccagatattccggtgcgacggtaatatcgtcagcgacacggttcatcttgccgagataacgatcctgcatgtacagcgccagcacgttgttagcgacttcagttgcacccggtacagtcaacggcgtttctgcggcgttatgaccgacttcatgccagatcagccagtcgttcagcggcgtcgtcggcagcgtggtgctgttcggcgagaagctgctgttcattaccggataacccgaatgcgcatcaccgatggagatctgcacatcgttggtgaaacgatgtttgtggcccggcaagtttttataggtaaacatccggtgcttaccgtcttcgctatcacggccgtagaagtcattcatcgagctggcaaaggtatccagatcgttagcgaattgctccagtccgccagtgtaattgctggcattcaggttcttcttcggtgtggtatagacgaaagcgtctgattccagctcacccagcggagccggtgagttcagatcgtttttccatgcgccgtctttatagaacggtgcttttaccacgccagtaaaggtgaagctggcagattcattggtagagctattgcccttgatataaatcaggccaccgtaaggcaccttgaacttcaccgtaccgctagcgtccagagagtacgttttagtcactcttggcggacggttcagcgcaacttcatgcttctcacgtccggtcaggtcgtcagccagcgccacggtgacggtcacaggaacgttcgcattggacttaatggtgacctctttctgagccggtgcccacaggccagttgactgcatgttacctgcaaaccatttggtcggattcgagtacaggctgatggtttcagtaacgttctgtccctcttccgatactgctcccggatacttctcgacatcaactttgatgttcagatcccaccaggaacggcccagcatcaggcgtgtcagcggtttttccatatagttgagcgggtagctcgggttcatcatgcccgctttgctgctaccgtcaccgtagatcatgttgttatcgaccagcgattttttcagatctgcagaacacttggtgccgcctgcataggcatcattggcgtagcagttcaggaactcggtgaacgttttaaagcccagctcgtcatttttgccttcttcataacgatagctcgtatcgttccacagccagaccgacatgttctggtacagacgttccagatcgacgctgctcagacgctcacctttgcgaccattggtccggaagtagagctcatgctgatacagacgctgaatgttggtgcctaaatccgcagcctgcaccatcgcttttgcagtgtcggcgttaaggcttagttgcgtatactgtggaacatacatgccaccagtaaccggaacccccgtgccaggacgatattccaggcagttgacctcatagtgatatgccggattagtacactctttcagccccgggaacgcggcgaaaattttctccttcgcagccttcagagaatcctctgttttatgatcggcctcatcaataaaggcataacgcgtttcctgtttgccatctacatcttccagccagctggcaacttccagcttcggtttgtcatcaggtttgttttctacctgatatttccacttaacttcccctgtcttactatcgatggtgtacggcagcgcaccatctacggcaggataacgttcatagacccaaatgcccgttgcgcgctgctgacgaacgcggttcggatacccttgcggatcgttatttactaccgacttgttcagtgccatcgacagacctgcggcatccaacagacgcacaaaaccagacgcgctctcttccttaagattgctcatcacgttttccatgatcagcaccgatccacctttgttcagataggcgatcagatcggtcacatcctgctgagtcagcttcggtttgctggtatctgcacgcagcgggattgcataaggatcgttacccacctgagtcacatattcaaagccgttaaggatcagcagcggcatttcctgcggatcgagatcgccatagctacttaaatgctcaacagagatgcccgcaaaatccggatggaagtcgaacgcagcgctgtttcctgtaacctgaccatgacgtttaaaatagacagtatccaggttggtgcctacggtcatgctggctttcgcgtccggcttccatttatcgtcggacagatagcgcagcacgttctccatgaagttcttcatgtcatccgggtcgctgttgagcgtacactgcccatctttattaacgcccccgttccagctgtaaccgttcgggcaacgcaaaatgctgttgtagtgtgggttaccgataaccatcagtttgccctcaccgacttgccccagcgaaataaacggcaggttaaaggtggcggtatcgcgcgtaacgttttccggctcaacaagagaaggcgcttccgtaatgtacgccagctcgtttttatcccaggcgcgtttttcgccgaaggccagccagtagtttttatcattacgcgccatcagaatcgggaaggccgcgttggagatattcaccaccgcctgaccgcgcgcattacccgtgctgccatagaagttggtggagtcatggaatacatggaacttgctgacagatttgtagttcgtatccacgccccacagcttgttgataacgccctgaatctggccgtcattaacattgcgcgtcgtcagcgagaaccagcgagcctcgttacaaccatcggttttcgcacaaatcgcggtatcgatctctttggcctgacccgtattaaactgctcaataaattcgttaggcagattaacgacttgctcaccttcccccagcgtcgcaccgttggataacgagagattgataatctcgttgatcacgttgggatattcggcaaagaccttgcgtacatcgtccggaacaacacgggtattattttgcccggtcgtcgaatagcgatgaataagctgatcaatattcgccccgcgaacttcatcacccagttcagtcagcgcaatggtcgacttattgccgcgcactgaacccagttcaaaggtatcgataccaaaggagatggtttcgccccagctaaaggaaaattcaccattttcccctgtcacgccacggcctgaattggtgtagtagttgacgccagcaacaccatatccctggctatcgaccagtcgaccttcagagagaatgatttcagtgggttgatactgataaaactgttccgcgttagccgacacgaaggaagcgttcagatccggttttgttcccggcgtggtgacgggcacgaccggtgaagtatgagtggatggcgctttatcggtcgcagcattgttttccacctcttcattgaccagctttttgaactcttccggtgccagatcgatttgcttatacagcgagtcgaagcgtttactctcgatcaccgaggagaacgtcagacaaacctgttctgtattcgccggacagctgttactggacgttaccagcgaaaccgcattgcttttcttgtcatcggagcccgccagttcttgcgcgtcctcaaggctaaacgacactttttcaaccgcacgcaagctacgcgcagcttctgactgagtgttgaaggtggcaattgtcgtgttacccgccacgcaagtaacgtcctcgccaggtttaaatgtaaagccatcgctggattcaccattacaggtagcaccagttacccgctggcttccgcccagggtcagataacccgttttcgtaggaacaggttctggctccggttctggtgttggttcaggatcaggtatcggttctggcgtaggctctgggtccggcgttggctcaggcgtcggctccgggtttggtgttggatcaggtttcacttccggcaaagaccctgttccagaatctacaggcggcgtatcggaggaagatccggaaccaccgccatcacaaccggctaacagggttgcgctcaaaatagccgctaaaagcgatttcttatatttaaatttcttattcattaataacgcaagtgacaaaacaatgttaaaaaattcgtaactgggagaaatagttttatgctttatcttctctaataacttcctccattcttaagaaaacgacatcattgatagaaaacaggtgaaatttataagaataacccctatacgatgtctatctggctatttttacgaaatttcaacaaacaaaaaattaacaacatttcacaacgtaactatataaatttgttggtagttttaacgattaagattgcaaaagcaacagatagaacggtgtttgctcatcaagcgaacataattaatacagacttgttttgcgtgataaaaaaatagatgttctcacgctcttaattatttagcaggttatctgaacgcaaaacattattgctgcatggataataaagcgagaaatgattttcaattaataagacagaataatgtaaatgaagccggatgatattaacgatcatccggctttattgatttacgagactaacatcccggtaaacacatacgcctgcagcagggtgataatgccgataacgctggcaaaaatcagactgtgcttcacggtgtagcggaacagttcagattctcggcccaccatgcccgtcgcggcgcaggccacggcgatagattgcggggagatcatcttgccagttacgccgccgctggtgtttgctgccaccagcagggtgtcagagacgttgatttgctgcgccgtggtcgattgcagtgaaccaaacagggcgttagaggaggtgtccgagccggtaaggaatacgcccagccagccgagaaacggtgagaagaacgggaacatcacgcctgtacctgccagtaccagcgccagcgtggtggacatgccagaatagttggtgacgaaggcgaacgccagcaccatgccaatcgacagtatcggccacttcaagctaattagcgtttcggcaaagacgccaatacctttcttgatccccacaccgaggatgaagatagagataatcgccgcaataaaaatagcggtgccgccagccgagagggggtcgaatttaaacaccgcatccattggcgttggttgggcgacaatgggtgccgctttcaacacttgttgatgcaaatgagggatctggaaattaatcaccagtgaataaaacgcgccgcccggagcaaataacgctttaaacggcttcatggtccagatggtgaccagcaccgttaagattaaaaacggtgaccacgctcgaatgatttgccccagactatattctgaaggcacgggaccgccagaagatggcttatttaccaccatcgcacctgcggattgtcccatgctgattgccgtttcggtatttttcggccgccagactttaaggaataaagcgagtgagacgatactcaccagcgccgaagtaatatccggcagttccggaccaatatagttagaggtaaagaactgagtgacagcgaagcttcccccagcaaccagcgccgctggccacgtctctttcacccctttccagccgtccatcattgctaccagccagaacggcacaagaaccgacaggaacggtaactgacgtcccgccattgcgccaatgtggaacggatcgattcccgttacctgaccggcgaccagaatcggcacgcccaacgcaccaaacgccaccggcgcagtattggcaatcagacacagccccgccgcgtataacggtttgaagcccaggcccaccagcagcgcaccggtaatcgccaccggcgcaccaaagccagccgctccttccagcaacgcaccaaaggagaaaccaatcagtaacacctgcaaacgctgatcgtcggtgatggagataaccgagctgcggataatatcgaactgcccgctggcaacggttaatttatacaggaacaccgccgcgacaataatccacgctattggccataatccataaataaagccatagcccgcagcagcaaatgccatatcaatcggcattttaaaggcgaatattgcaatcaggatagataatataagggttattgctccagcgacatgtcctttcagacgtaataccgcgagtgcaacgaagaagaatattatcgggatcagggcgaccagagcggatagccccagtcctcccatcggcatatacatttgggtccaggtaaccatattgttcagtctcttattatctttatatgcttgatatacttaaggttgtaataagcaaaagaggactgaactgtaaaatataggcgttatactttacagcaacagtacgccgctaacgcaattgctacctctggcataacaagtatatcgggtaagggtttctgttccgcacacgcagacgcagagtatcgttaagatgtccatattgttgttttaggcccgctagtaatgcgctacgggtatttaatattgttaaaccctgataatcgctccggttatttccgggataaatgtactaccgcagttactatcatagccccgacaataaaacttgccggggcttttttgacgctattaatgactttctttttcgcgtaaacgccaggcgtgtaataacggttcggtatagccgtttggctgtttcacgccgaggaagattaaatcgctggcagctttaaaagcacacgagttagcgaaattccccgccatcggacgataagccggatcgccagcgttttgctgatcaaccactttcgccatattctccagcgacgcctgcacctgttctttggtcagaataccgtgacgtaaccagttggcgatatgctggctggagatacgcagcgttgcgcggtcttccatcaacgccacattgtgaatatccggcacttttgaacaaccaatcccctgctccacccagcgcaccacgtaccccagaatcccctgcacgttgttatccagctcttgttggatctcttgcgccgaccagttagcgttttcagcaaccggaatagtcagcagatcgtccagcagcggttcaaattcagcattgaactcggtctgggcaatgttggcttgtacgctctgtacgttggtttggtggtagtgcagcgcatggagcgtagcagcggttggtgacggaacccaggctgtgtttgccccggcacgcagttggtcgcccttctggctgtacatgtctgccatcaggtccggcattgcccacatgcctttaccaatttgcgctttaccgcgcagcccacagaacagaccggaaagcacgttattacgctcgtaggctttgatccaaggcgtcgatttcatctgatttttacgcagcatcgggccagcttccatcaccgaatgcatttcatcgccggtacggtcgaggaaaccggtattgatgaacgccacgcggttgcgcgcctgagcgatacagctacgcaagttcagcgaggtccgacgttcttcatccataatgcccattttcagggtattcggtgccataccgagcattgtctcaatgcgggtaaacagtttgttggcgaacgccacttcctgcggaccgtgcattttcggtttcacaatatagacgctgccagtgcgcgagtttttctgcacttttaaatcatagagggcaatcgcgccagtcatgacgccatcaagaatgccttccgggatttcattgccttcgctgtcccaaatcacaggaatggtcatcaaatgacccacgttgcggataaacagcagcgagcgtccgtgcagagaaatttcagagccatcggcggcggtgtaatgacgatcgtcattcagtttacgcacgatttgccgaccgtttttctccattttctcttgcagagtcccctgcatcaggcccagcaggttgcggtacagcaggattttatcttccgcatcaaccgccgcgaccgaatcttcgcagtcgagaatggtactgatagcagcttcgacgataacatcgttgatgtgcgccggatcgtctttgccaatccgcccattggcatcgatttgcagctcaatatgcaggccgttatttttcagcaaaatgcaggtcggcgcagcggcatcgccacggtaaccgacaaactgtgctggagtacgtaacgtggtttctttaccatttttcaactggatgcgtaattgtttatcaaccaccttaaacgccaccacatcctgatagctgccgttttccagcggtagagattcatcgaggaaacgccgaacccaggcgataacctgctcaccgcgttgcggatcgtagccgctgaccatcgccccttcctgcgggatgatgtcgctgccgtataacgcatcgtacagtgagccccagcgagcgttcgccgcgttcagcgcgtagcgggcgttcattgccggaaccaccagctgcggccccgcctggctggtgatttcgctgtcaatgcccgtggtttccaccgtcacgcgctccggttgcggcaccaggtagcccagttcacgcaggaaagatttataggccgctttatcttttaccggccccggattgctgcgatgccactcatcaagcgctgcctgaatgcgatcgcgttctgccagcaactgacgattttctggtgccagatcatgaacgatctcatcaaaattgcgccagaacgccgcagcgtccagccctgttcccggtaaaacttcttcatccacaaaacgtttaaaattggcgtcaatgcgtaaacggctctgggttatggtttgactcattgtttatctcctcgttttcgcttatttcgccaacaccgctgctgccgctttcgcgacctgcgcatcctgtgctccggttaaaccagaaacgcccacggcaccaataatttgcccatccacaacaaccggtacgccgccttccagcgacgttaataacggcgcagtcacgaacgcggtacgtccgttgttcaccatctcttcatagcccttagtttcacgacgccccagcgcggcggtacgcgctttctcctgggagatataagccgcaatcggcgcgcaatcgtccatgcgacttaacgccagcagatgaccgccgtcatcggcaacagcaatggaaacagaccagttatttttctgcgcctcttcctgacctgcggcaataattgcactcgccatttgctggctaagaatgactttagttttcattttgttattccttttcaagggcttgttctacaatttcaatccagtgacgcacagaggtacgaccggcgctcgccagatgcgtctggcaaccaatgttggcggtgacgatcatttccggtttgccgctttccagcgcattcattttgttatcccgcagctggcgtgccagatcgggatgcgttaacgcatatgttcccgctgaaccgcagcacagatggctgtcgggaacgtccgttaaggtaaatccaagacgaagcaacactttttccacttcgccgttcagcttttgcgcatgttgtagggtacacggacagtggaaggccagctttttatcgccgcgaattgccagtttttccagcggttcctcgcgcagaagttcgactaaatcgaccgccagttcactgacctgacgtgctttatcggcatataacgcatcgtttttcagcatctgcccatactctttgacaaacgcgccgcagccgctggcggtttgcaaaattgcctcggcacctgcttcaatcgcgggccaccaggcatcaatattattgcgcgcccgtgccagccctttctcctgcgcattaagatgatagtccaccgcgccacaacagcctgcttcgttagctggcatgacgctgatccccagacgatccagcactcgcgcagttgccgcgttggtgttgggcgaaagcgtaggctgggcgcagccttccaacattaaaacccgacgcttatggcgcagcggcggacgcggtttagctttcaccgtttcagcaggcagttttgctctgacctgttccggtaaaaacggtcgcagcaccagccctacctgcgtcagcgcacggaagaccgccggacgcggcactacctggcgcaatccttcgcgcagtattcgctccggcagtgggcgtttcactttctgctcgacaatatcacgcccgatatccagcaaattgtgatagcgcacaccagaaggacaggtggtttcacaattacggcaagtgaggcagcgatcgagatgctcctgtgttttaagcgtgacttcgttgccttccagcacctgtttaatcagatagatgcgcccgcgcggcccgtccagttcatcgcccagaagctgataggttgggcaggttgcggtacaaaatccgcagtgaacacaggcgcgcaggatgctgtcggcttccagcgcgcgcgcgttctgccgcatctcttcagttaattgggtttgcatagcctgctcctcaaagttccgcgtacatgcgaccggggttaaacacgccgcaagggtcgagctgctgtttaagctgctggtgatagcggaataaaggagccgatagcggggcaaagccaccatctccggcactaaagcgggtcgcatgaccgccagcgttgcgggcgatgcgatggatttgattgtcctcggctgtcgatttcagccagcgtaacgccccgccccagtcgatcagttgctcgccgggtaaatccatcatcggcgcatcactgggtaatgaaatgcgccataaggtacctggtaacgagaagaacggcagttgttgttcacgcaattgctgccagaactgaccggcaacctcttcgccacccagcagttcacgcgctgcttttaccgatccttcgccgccctcaaggcggatccacaacgcattgtcgaagtaacataagccactaatgggtaatggctggagttgccactcggcgatttcactcatggcttcttgcaggctgatttcccgacgcaggctcagggaggcgcgcggtcgcggtaacactttcattgagatttcagtgagcacgccaagacaaccgtagcttccgaccattaaccgtgagagatcgtatccggcaacgtttttcatcacttcgccaccaaaacgcagatgttttccagcgccggtaatgatgcgcgtgccgaggacaaaatcgcggaccgaaccgctccacgggcgacgcggccccgccagcccgcaggcgaccatcccgccccaggtggcttcttcaccataatgcggcggctcacaggggagcatttgccccgcgctttccagcgccgcttcaattgtcaccagcggcgttccgacacgcgcggttatcaccagctcggtcgggtcgtaattaacaatgccgcgatgacaacgaacatccagcgtttgcccggtgacagggcgacctaaaaaggctttgctattgctgccctgaatcaccagcggcgttttatcgctaatcgcctgattcacctgctccagcagcgcctggctgtaatcacactcgcgtagcatcagaaacgctccagttcagggaaaggtaaatgaccgtgatgcacatgcatggcaccaaattcagcacagcggtgtagcgtgggaatgtttttcccagggttcagcaaaccatcggggtcaaacgccgccttgaccgcatggaaggtcgtgatttcatcgctgttgaactgggcgcacatttgattgattttttctcgcccgatgccatgttcgccactgatgctgccgccaacttcaacgcagagttcgaggatcttcccgcccagctcttccgcgcgggcaaattcaccgggttcgttggcatcgaaaaggattaacgggtgcatgttgccatctccggcatgaaagacgttggcaacacgtaaatcatattgctgcgataaacgggcaatgccttccagtacgccaggcagggcgcgacgcgggatggtgccatccatgcagtagtaatccggggagatacgtcctaccgccgggaacgcatttttgcgaccggcccagaaacgtacgcgctctgcttcgtcctgtgccagacggacgtcagtcgcgcccgctttcaacaagatgtcgttaacccgctcgcagtcttcctgtacgtcagactccacgccgtccagctcgcataacaaaatcgcttcggcgtcgacgggataaccggcatgaataaaatcttccgccgcgcggatcgacaggttatccatcatctccagcccgccggggataatgccattggcgatgatgtcaccaaccgcaagtccggctttttctaccgagtcaaagctggctaacagaacccgcgccacgggcggcttcggcagcagttttaccgtcacttcggtggtcacgccgagcataccttccgatccggtgaacagcgccagcaggtcaaaaccaggtgaatccagcgcgtccgatccaagcgtcagtgcctcgccgtccagcgtttgcacttcaattttcagcaggttatgtacggtcagaccatatttcaggcagtggacgccgccggcattttcagccacattgccgccaatggaacaggcgatttgtgaggaagggtccggtgcgtagtagagattatgcggtgcaacggcctgggagatcgccaggttacgcacgcctggctgcacgcgcgcgcggcgaccaacggggttaatgtcgaggatctctttaaagcgcgccatcaccaacaacacacctttttccagcggcagcgcgccaccagaaagcccggtgcctgcaccacgggtcaccaccggtacacgcaggcgatggcagacagccagaatcgctgtcacctgttccatttgcttaggcagaacaaccagtaatggacgcgtgcgatacgcgctcaacccgtcacactcgtaaggaatgatctcctcatcggtatgcaggatctcaagtccagggacatgctcacgcagtgccatcagtaccgatgtgcggtcgacatcgggtaaagcgccatcaagacgctcttcgtacaagatgctcatgagtaggcttcgctttgttgtgttgtgtggcagctgatttttgcgcgctgcttctgtgaacagttattaagcgggcttttcgttttcgtctatctctttagctaccggtcagaccattttttttccagctctgtgaccttgtcttggttaactcaatgttaaattgatgtaacataatcacttacgtgatgtgcgtgttttgcgagttaagaacagaaaaattggtcctacctgtgcacgaggtccgggaatgaaagatgaacgtcgccctatttgcgaagtggttgcagagagtatcgaacggttaattatcgacggcgtactgaaggtcggtcagccgcttccctcggaacgtcgactgtgtgaaaagctcggcttctcacgctccgcactgcgtgaagggctgaccgtgctgcgcgggcgcgggattattgaaacggcgcagggtcgcgattctcgtgtcgcacggcttaatcgggtgcaggacaccagcccgctgatccatctgttcagtacgcagccgcgaacgctgtacgatctgctcgacgttcgcgcattactggagggcgaatcggcaaggctggcggcaacgctgggaacgcaggctgattttgttgtgataacccgctgttatgaaaaaatgctcgccgccagtgagaacaacaaagagatttcgctgatcgaacatgcgcagttggatcacgctttccatctcgccatttgtcaggcttctcacaatcaggtgctggtgtttacgctgcaatcattgaccgatctgatgtttaattcagtgtttgccagcgtaaataatctctaccatcgaccacagcaaaaaaagcagatcgatcgccagcatgcgcggatctacaacgcggtgttgcagcggctgccgcacgtcgcccagcgcgcagcacgcgatcatgtgcggaccgtgaaaaagaatctccacgatatcgagctggaaggccaccatttgattcgctcggcggtgccgctggagatgaacctgagttagctggtattaaatctgcttttcatacaatcggtaacgcttgtacggctccgccccaatgcgttccagcatgttattcatgcctgtattggtttcgaggatccatgacatctccagcgcatcgatcttccggcgggcaaacggatcgcgtaaggcttcaatcaataacagcgcaatcaccgggccgatgcggctgaactgatactcgtcgcgcacgcccatcagcggtactcgcgcagttcgcacaccgctgactttcaaacgccacagcaattttgcccagccgaagggaaagagcgatccgttcagatcggcaatcgcctcgttgatgttcggcaagccgacaataaacgcgcagggtgcagaatcaatctcagcgatatagatcatatcgtccggcaccagatatttaagttgatcgcccatggtcgcgaattcatgttcggtaaacggcacaaatccccagttgtgctgccagccagagttgaaaatctcacgcaggatctgcatctcttcggcaaaccgctgacgattgatgcagcgaatggtcacctttttgcgcacctgatccatcagtttttttagcgccggagagaaagtgagatcggttcgctgcatccaccacgccagtaaatcaatgcctttgtgataacccagttgttcaatatgcgcggcataccacggtttgccgtgtggcatcatcgcacagggtggtgtgtcaaaaccttcaatcagtaatccgctttcctgattgatattcaggctgaaaggaccgctgatcttacttgcaccttgtgacttcaaccacgcttccgctgcgccaaacaacgcggcaaaaacctgcggatcatcaatggcgtcaatcatgccgaaatgaccggtatctttgccgtaacgctcgcggtgcaaggtatctatttgcgcggtaatacgcccaactatctgccccgctttttttgccacccacgcctgccagatgatatggtccgtccccggatttttcgcagacaaatgctcgttgcgttcaatgaataaagggggtatccagtttggatcgtcgggataaagtgatgacggaaaagcgataaatgccttaaggtcatttttattaaggaaggtgcgaacaagtccctgatatgagatcatgtttgtcatctggagccatagaacagggttcatcatgagtcatcaacttaccttcgccgacagtgaattcagcagtaagcgccgtcagaccagaaaagagattttcttgtcccgcatggagcagattctgccatggcaaaacatggtggaagtcatcgagccgttttaccccaaggctggtaatggccggcgaccttatccgctggaaaccatgctacgcattcactgcatgcagcattggtacaacctgagcgatggcgcgatggaagatgctctgtacgaaatcgcctccatgcgtctgtttgcccggttatccctggatagcgccttgccggaccgcaccaccatcatgaatttccgccacctgctggagcagcatcaactggcccgccaattgttcaagaccatcaatcgctggctggccgaagcaggcgtcatgatgactcaaggcaccttggtcgatgccaccatcattgaggcacccagctcgaccaagaacaaagagcagcaacgcgatccggagatgcatcagaccaagaaaggcaatcagtggcactttggcatgaaggcccacattggtgtcgatgccaagagtggcctgacccacagcctggtcaccaccgcggccaacgagcatgacctcaatcagctgggtaatctgctgcatggagaggagcaatttgtctcagccgatgccggctaccaaggggcgccacagcgcgaggagctggccgaggtggatgtggactggctgatcgccgagcgccccggcaaggtaagaaccttgaaacagcatccacgcaagaacaaaacggccatcaacatcgaatacatgaaagccagcatccgggccagggtggagcacccatttcgcatcatcaagcgacagttcggcttcgtgaaagccagatacaaggggttgctgaaaaacgataaccaactggcgatgttattcacgctggccaacctgtttcgggcggaccaaatgatacgtcagtgggagagatctcactaaaaactggggataacgccttaaatggcgaagaaacggtctaaataggctgattcaaggcatttacgggagaaaaaatcggctcaaacatgaagaaatgaaatgactgagtcagccgagaagaatttccccgcttattcgcaccttccctaaatcaggtcatacgcttcgagatacttaacgccaaacaccagcgaaatgagcggcttgccgacgatcaacaccgcgagcgccaccagaataccgattccgcccgccagtaaaccggacttcacacctaacaaccacggtctggtggtgcgcggatctaaacgcatcacctctgggtaaaaacttttacccagcaaacccgctggcgttccggcggcgtcgaagaatgtcatggcgattttaaataacccggcggcagcgggtcctaacacgatccccaccaacactgtgctgcacgagttacgcgccgaccagatggagtgggcaatgttggttgaccagacaaaactccacgcgcctttaatgtatcgggcagactcaaacagattcaatttgaaggcgttatggatatttcggcggcgtaattcgcgcgcggcaaaccaccagtacatggtgccgccaaccagattcgacacgtaccaggcaataacaaaacccgcaaaaccaaagtcaaaataccaggctacgacgctccccgctgcgcgcagaaaaggtttcgtcgcctgctgtacagcaattaaatcgaagcgatctaccgcacgcagaatgccggtcggcgtggaggaagccattgaaggaatgagcgtgcaatagagcgctgccagccaaaaactttggtcatccagacctaatgaatgggaaaggaatggcagtaaggcaatgccaccgacaatcgccaccgcgccgctgacgatatccagcgagaaggaaaatgagacgacattgcggaattgctgcggattattgttggttaatgctggtgttccgtactgaaccaccagttgccatgtctgaaacttaataaaatcgctgatcgacttggcgtacgattgcacaatcaccagtacgccaaacatggcgggcgtcatccctttaccggcacacgagagcgccaacagacccagcaaggcgctcacgacattactggagcctaaccaggcgctattgcgaataatggtgcgaaacgcgccatctgcaaaccaatgtttgatgttaaaacccgccaattcagcctgaccttatcgttgatagtaaaaagtatcccgccagccttaagttaaacttcggcggtcagaaacgatggcaaccagagaaaccgccttctgtgcctgttccagcacttcgctgtagggcgctctggaatcaatctcaagaatttttgtgccgttatagccaatcttcgacatgacaccgattttgtcctgcagctcggcatagtcatggtcaggcttgcgggagatggcagtctcaatatcaatgcccaggcgaataattaattccgggcgatattgcgccatttgttggtataaacgccgttcgcgctgcgccagaaacatgctgattttcccggtcgcacgttcgacgccaatccccggtccatcataataaaagcccgaaatttcagcctgcgggaagcgatcgctgaccaccagaacgccactttgcgccagtcgctgaaccttgcgtagattcgccattcttcgcagcgagaagcagtacataatcaccgccgcccatagcgccggagatttggttttcatgctttgggttttcgaggatttggccgccagtcgccgttccagccagacgccaaccaacggcaatcgtttgattttgtcgccgtcttcgccggagagcagccccagatagcgccgctcggtttgccagtgttgttgcagcgatttcaccaggtcggtggtcagtgtggatttaccggtgccatcacacccgaccaccgcaatcagccccggaatgtagttgggctgcggcgcggttgtactattaacagtttgagtttgtagtgcatccattcgttaaatcatcccctatccattttggtgatcaggaaagcgcggcgtgaattgcgcgtagtgacgcttgcagaatttcatcggcggggtgtcgcccatccagttcaaggatctttgcgccattgaatgtcagttgcggcgtaacggcgattttttcctgtaacgctgccagttggtggtcaggtttacgcgcaaacgcggtttgttcatcaatgccaagacgaatcaacaatacgggcaaataagatgccatccattggtacagcttcagctcgcgctgccttaacatttttatccaaccgttaccgcccgtggtttttgccaattgcgggccatcaaagcgaaaccccggcacttcaacctgcgggtagcggtcggtgatgagcagaaagccttgctggcttttacacaacattttgcgaaacttgtacgcccgccagcaggaaagcagatagataaccagtgcagtaatattgccaggcggtgttgagggcttttcgtgcacatgtgccgctttacttcgcagataacgcccaaaaggtgcgccaataacagggagctgtgaaatccattcgccaattcgcccggacgattgcccgagataaatgtgttctgttggcattcttgctgccagttcatttaccaggcttgccgtgagggtcgatttacctgaaccatcacatcctacaatggcaataacacgcactggcgtggaattaattattgacatattacgttgattcacgaaaaacccggcagtaaataatgtattgaatattacgtggtccgtgctcagaatatccgttcaaccttattgtgacaatggttaattgtgacattgacctgaattacgctttcataaaaacatattaaccaaataaatatttttaatggatatttaaattaaaggatatattcatgcagtcaataacacctccattaattgccgttattggtagcgatggttcaggcaagtcaacggtgtgtgaacatcttattaccgttgtcgaaaaatatggtgctgccgaaagagttcatttaggaaaacaggccggaaatgtcggtcgtgcagtgacaaaattaccgttgatgggaaaatccttacataaaacaattgaacgaaatcaggtgaaaacagcaaaaaaattgcctggaccagttccggcgctggtaattacagcgtttgtcgcccgtcgcttactgcgctttcgtcatatgcttgcctgtcgtcgtcgcgggttaattgttctaaccgaccgttatcctcaggaccaaattcctggcgcttacgatggtacggtgttcccacctaacgttgaaggtggtcgttttgtctcatggctggcaagccaggaacgtaaagcgtttcactggatggcgagccataagcctgatctggtcatcaaactcaatgttgaccttgaagttgcctgtgcacgtaaacccgaccataaacgggaatcgctggcgaggaagattgccataacgccacagttaacctttggtggtgcacaactggttgatatcgatgccaatcagccactggaacaggtgttggttgatgcagaaaaagcgattacggattttatgaccgcgcgtggttatcactagtcaaaaatggaaatgcccgatcgccaggaccgggcattttcaggaaggttaaatcaactgcaatgctatccagtacagcccaccagaaagaaaaattgccgccggtaaagtaaatacccacgccatcaggatgctggttaccgttttacgctgtaacccaccgccgtccaccaccatcgtccctgcaactgcagacgagaggacgtgtgttgtggagacgggcatcccaatataactggcaagaccgatagacactgccgccgtcatttgtgccgccatgccttgcgcatacgtcatgccgcgcttaccaatcttctcaccgatggtcatcgctacacgacgccagccaatcatggtgccaatgccgagcgccagtgctaccgccatgatgatccacaccggagcgtactcaatggtgcttaacatatcgctgcgaagttttttcagcaggttctggtcttctttactgacgcctggcagtttcgctagcttcgcggaggtatcagagatgcacagcataatgcggcgcagctggctgcgctgactcacgcttaacggctcgtaactttccatattgcctggcagcatcgttttaacgcgcgcaatagcatcaaaggtatttgccggatgacagtgaaactctgttacttgcgtgccatcagtcgatgctgcaggcaatggaggttccatcgcaatcaacttctgcggcagttcaggatgctgttgcaggtagtgttcgaagttggtaacggcatcgcgggtacgggtaatttcatagccggacgcattcatattgacgacgaagccagcaggggcaatccccaccagtaccagcattaccaggccgatccctttttgtccgtcgttcgcgccgtgcgaaaacgccacgcccgcagcggaaacaatcagcgcaatacgcgtccagaatggcggtttacgtttgccttttttctttttgcgatcttccggaatgcggtgaatacggtcacgctttttcgtcccgctccagtagcgtcgcagcaggaatatcaggcctcccgcaatgaccaggccgacgataggggaaacaatcagcgaggagaaaattttggtcacttcacgcaggtttaacgcatccatcaccgatgagccggttaacagcgcgttggttaaaccgatgccgataatcgcaccaatcaaggtgtgcgaactggaggccggtaaaccgaagaaccacgttcccaggttccagataatcgccgccagcagcatggaaaagaccatcgccaggccgtgggttgaccccatattcagcaacaaatcggttggcaacatatggacaatggcataggcaacgctaagtccgcccaataacacgccaaaaaagttaaaaaatgccgccatcaccacagcaagttgtggttgcatggcacgagtataaataacggctgccaccgcattcgccgtgtcatgaaaaccattgattgcttcgtagaacaacacaaatgccagagcaagcaataacaaaagccctgtgtatatatcaaggccaacaaataaatttagcatatattagattacgccattttgaatttacgaacggacgcattatcagtgactttaacggcatgggcaaagtgaaatatcattttttaacgataaaaagagtgttatttcttgtgtatcagacaataagcattcattcaaaacctttagaaataatcaaaacacaggtattccactggttaatatattcacatatgaaatgaataaatattggaatatataaatattgaatattttgattaatccccgtactgattattcttcataatcagtacggggttgctacaacatgtattactttttcaccacaattaacggttcaatatcactctcttttttgatgaccagtgattcatcaccgcgcaaacacgtcccaccgtagttgccgccaacggtgaaggtacatacctgaatgtatttaccgtccactttcggcaaacaccacagttgctgatagatgtttttctgctcggcaaatttaccgctggttttgtccagcacctcttcatgatggctgacgaggtcgatattgctgccacagcgaccggcgatcggtttcactgcgtaacctgttttcaccagttcatcattaacagtgaaatcggtatccagcaggtaacgatggtgcgggaacagcgaccagaggatcggcagaatcgctttgttgccggggatcaccgtccacagcggctcaaagaccagcacttccgggcgcagcaatacgtcgataagacgcacttcgttttgcggatgaccggtacggattggcaccgcagcaaactcacggtcgctaacttcacgaatctgatcaaacgcggtttcccacgcccaggttttccacacgcagttaaccagtcgcccttccccatcaatcagttgcccggcagcatcccagcccagttcatccaatccacgcaagatacgcgtttcaaagcccgcctggtgcagcgcctgctccataaactgcgcgtgatagttttcctcgatatctttgtcctgcatgatatggacaaacggacgtgcacgactgtgtttccaggcaccagccaattcgttaatcagcccttccgccggattgaagccgttgcctttatagccctgctccgcccaacgttcgaggatcaagcccgcttcggtatgacaggaggcggagtcggcgttgtactcgtaaaccttcaggccacgctcatccatgcagaaatccatacgaccagtgatcatatggtgacggcgacgctgccaggagagacgcaaacgtggccagaggattttcgggatgtcgaacagcgccagcaggttgtcatctttcagcaccttgtcggttgcgtgaagatacatcaggtgcagctcgttggtggctttaattagctcctgctcggcactctcggtaatggtgtagtaatgataaggatcctgattgatcacctgaccgttggcctgcacataggcgttttgcagcggatctttttcatccagccatttaccgtcaaactggcctttgttttccaggcgcgctccgctgattttcagcagctcgcctgcaatttccggctgcggtaagctgtattcagtatcttccgtctggatcatccagcccagaatggtggtgtcatcaaaagtgtctttcagggtatagcagccgttttcgaccaccatctccagctcgcgcgtccactgttgcccttgcggcaacggggaatgaatcacgttctgttccgcaatacggactttgttgccatgcaattgggtaatgatggcgacatggccagtgtctttaaattcaccgcctttatcccagataagaagcgcacccgcgaccggcgcacgcggcgagccgttaggaaatgcctgcaatggcaggatgttgtcattaaccacttctcgcaggaagcgcagcgagaaaatctcccacgccatacccacgtcagtaaagaccacaccgtaattcagaaagagaaaacggcgagcaaattcaacgcattgccacttgtggcccatatattcgtcgtcgatatagctacggaatacggcgtcatcttcgtattcctgcggatcgagagaactgtaatctgaagagtagattgctaccccacctggggcgtagcccaataatgtcccgaacggggcatcctggctggtcgttcctttgctcatcactttacctttaacaatacaacctaagcagttggcgtaattgttgtgctctgattacctgctcagcgacattaaccggacagaggtcagactaatcatacacctcatcgcagcggctggcgcaaagggttaaaaaattcacattctgtacagcaagtgacctgctacactgcttcaacactaccactcagaaggcaactcactatgacagacaatacttatcagcccgcgaaagtctggacgtgggataaatccgctggcggcgcgttcgccaatatcaatcgcccggtttctggtccgacgcatgaaaaaacgctgcccgttggcaaacacccattgcaactttattcgctgggaacgccgaacggtcagaaagtaacgattatgcttgaggagctgctggcgctgggcgttactggtgcagagtacgacgcctggctgattcgtattggcgatggcgatcaattctccagcggctttgtcgaagtgaacccaaactcgaagatcccggcgctgcgcgatcatacgcataatccgccgatccgcgtgtttgaatctggttcgatcctgctttatctggcggagaaatttggctacttcctgccgcaggatttggcaaagcgtactgaaacgatgaactggctgttctggttacagggcgcggcaccgttcctcggcggtggttttggtcacttttaccattacgcaccggtaaagattgagtacgccatcaaccgctttaccatggaagccaaacgtctgctcgacgtgctggataagcaactggcgcagcataagtttgttgcgggcgatgagtacaccattgcggatatggcgatttggccgtggtttggcaacgtggtgttaggtggtgtgtatgatgccgctgagtttcttgatgcgggcagttataagcatgtacaacgctgggcgaaagaagtaggcgaacgtccggcggtgaaacgtgggcgtattgttaaccgcaccaacggaccgctgaatgagcagttgcatgagcgccatgacgccagtgatttcgagacgaatacggaagataagcgtcaggggtaagggttggtgttcgtcgcagcaagccatccaggccggataaggcgttcacgccgcatccggcaatcgtgcacaatgcctgatgcgacgctgccgcgtcttatcaggcctacgaaagctaatcatcacgcgctggtaatgtcgtaatccatttggcgcagtgcgtctaatgtggctttggcttcatcttcgtcgatgatgctcatggcaaatccgacgtgtaccagcacccactggcccagtagatcggcagggttaccttcacaaatcagggcgatattcacatcgcgcttgataccacatacttcaacctgcgcaagctggtgaatatcttcaccgacagccagcacctggcctggaacgccaatacacattattaactccggttattcaacttcaatacttttgacgatcagcgaatcgccggtatcgacacgcaaccgctcgccgtgacagagcggacactgcgcatcgtgctgatgaatctccaccacctggctgcaatcccagcaccaagcctgggcgggtttatagacgatatgtaaatcgcacccttgcgccaccgttccgtggcagacaatttcaaaactaaaacggacggcgctctcctcaacgcaggagagcgcgccaatttccagccacacggcggtgacgcgcttaacatcgtgctgctccgcctgccgttggataatttcaacggcgctctggcaaagagacaactcatgcattttcgccactcctgcgaccaaacagcagggcgcgacgccctgcgtgtggtacatccggattcgtgactggcagcgaaaggatcattcgtgcgcagtcatccgtcaggcgttggccctcttcaatcgacatgctgtgcgaaagcggcgacatcagcgaacaggagagatattgcgaaacaccgtccagttcgccaacggtaaaggtcatagtgccatacggcagttgcagaccaattttttcactcactttgcgcagcggccagagttgatccgggccggggaagataactgcactcagcatccacggggtgatcacacaccccgtccactgaccttcgaacagcgtaaaatcagaaacatacaccggcattgaaggatgcagaaaagagagatcgtgcatcgaacgccgggcaatttcttcaaacgctgcctgtacttgcgccttcggggaggtctggaaacctgctatctcttcagtcatgaatcgcctcccgtgggatggcttccacgccagattcacgcagcgcagccagaacctgctcaagcgcaggttcaatcattgcttcaaccgtcggcgttaagccgatgtgtggctccagcgattccgggatcacgccgaccagggtcagctttttcggaaactcgccggtgaagcgcagggccgacaagacgtcggccaggccaagctgatgcggagagattttgttggtaaacaacgccggaacttcttcatcccgcaggatcatcatcgttcccggcgcgttctttttcgagacaatggcatccgcaataatcaaatgatcgcgatttgccatgtcgccaagcagctccattcccgccgtgccgccatcgaggatctcaacataatccggcagaatgtatcgttgctctaacgcttcgacaatccgcacaccgatggcttcatcggtcagcaaaatattgccgacccctaagactaaaatacgcattacagaaccttcactgaaaccacttcgttgccgtcagcatccactacgtgtaccgcacaggccatgcacgggtcaaaggagtgaatggtacgcaccacttccagcggtttattcggatcggcaaccggtgtacccaccagcgactgctcgtaaggaccgacgtcatcattgaagttacgcggaccagagttccaggttgatggaacaaccgcctggtagttgctgatgataccgtctttaataaccatccagtgagagagcataccgcgcggcgcttcgaggaagccaacacctttgaattcacccgttgccggaatgttcggcttcacaaaggtggtgtgatcgcctttgccgatattggtgatcagtgcactgtattggttttgcaggatatcctgcaattcacagcagtgaacggtacgaccaataatacggcccagcgtggagtgcagctgtgccacttccagcgtgttgccagtcagtttctgataaatcgcaacgatttcattcagtttgttctgggtagattcgcgacctgccgccagtttcaccagcatattagccagtggccccacttctaccgttttgccgtagaaagtcggtgatttcacccaggaatatttcccgtcgtcagaccaaccatcataagccggaatggtggtgccttcccacggtgcctgcggcgcttcgtctttataccaggagtgcttcgcgctttcctgaatgcctttgatcaggtattcatcggaatgagaagtgatcggacgatacgaggacagatccgcattctcaatgtagccgcccgggaacaggaagctgccgtttttactgtcggtcgggaattccggcacgctcaggtagttcaccgcacctttaccgcgtgtcagccattccgggtagaacgcggcaataactgcggtatcaaccttataaacctgctcaacaaagtcgctcagtttgtcgatgaaagacttgatgtacatcaggcgctcaaggttcagcacgcccaaaccgtcgaggttgatcgggttcgcgacaccacctaccgccaggttctgaatgtgcggcgttttaccgcccagcagcgccacgacgcggttagcgtcacgctggcactccaacgcttgcaggtagtgcgctaccgcaatcaggttcacttccggcggcagtttcatcgccggatgaccccagtagccattagcgaaaatacccaactgaccgctggcaaccagatctttgatcttgttctgaactttggtgaactcttccggactgttcaggtgccaggtcgaaacgcctttcagcatttcggaggctttggttgggtcagcttgcagtgcagaagtgatgtccacccagtccagcgccgaaagctgatagaaatgaacaatatggtcatgcgtggtgtgcgcagccagaatgatgttacggatgtattgcgcgttaaccggaacgtcgatattcagcgcactttctgccgcacgaacggaagacagcgcgtgagtggtagtacatacgccacagatacgttgcacaatcatccatgcatcgcgcggatcgcggtttttcacgatctcttccatgccgcgccacatggtaccggaagcccatgctttcgaaacgacgccattttcgatttcgcaatcgatgcgtaaatgcccctcaatacgggttaccggatcaatagtaattctctggctcatgctttgctcgcctcatgacgattatgatcgttttgttttaaaggaggaagtatcggcagtagacgaatgagtacgatgtaagcgcaaatctcaatagccacaaaaccaatagaaatcaacagttcttcccaggtcgggaagtaggcgtaaccgccgcccgggttgaatgccaccagcgaataggtcagacgccaggttgcacaacctaacagtgcgctcagtgctgacaggaacagcatgcgggaatcattacgcagcttcgccacacgcagaacgaccagcgggaagagcatcagcaggacttcaatccagaacatcacggagtagaagtcaccggcaaacgctaacgacagcttgtcgcgatagataagctcgccaaagcgcagcacgatgaaaatcgccagcaacacactgatggtgttggtcagcttaacaaacagactcttttcatccggaccgttgccacgcagacccgcctgcaccagcgaaccttcaaagatgacaatcgagaagcccatgatgaacgccgtcagcagcgagaacagcggcaacatttcatagctctgccacaacggatgcaccttgtagcccgccgagatcatcagcgaccccattgaagactggtgcatggtcggcagcagcgcaccgagcgcgatgatgaagaacatcaccttgtttagtcgctgtagcgacaccttccaccccagacgttcaaacagtgccggagcaaactccagtgccatcacgccgatatagatggtcatacagaccgccgtctcgaacagtaccgagttcacgttgaagtgacccggaatgtagaagtacggcaggttccagtagcgacccacgtcgatagtgatcgacaagccacccagtgagtaaccaaacagactcgccaacagcgccggacgcaccagcggatggtattgcccacggttaaagacgtataccgcccacgccagcgcccagccgccacaggcaaagccggtgccaatcagcaggtcaaacgcgatccacacgccccacgggaagccgccgttcaggtcagagacagagcccagaccgaacaccagacgcttcacaatcaggagcatacagatgacgattaacggtccaaaaatcatgaccggtttactgatgattttgccgcccagcggttgtggatcatgactcatgatcgtctcctccgtcgtgatggtcgtttttggtgttgcgacgaaccagcacggttaagcccgccagcacagccagtggtagcatcatgcctttatacagggtgtgttgaatattttcggaacgcgcaccggtagaaagatcgtccagtttcggcaggtcgagattttcataaggcacacccgtcagtaccagaacctgagtaccgccgccctctttctcgccgtacagatgcggataatatttcggcaccgtatgcaggtaagtgtcgccagatttcagcgtctgacgcggatagtggtattcgctgccaggcttcagcgccagacgttttttcgcctccgccatcagctcttcacgcgtaccgaaaatcaccgcgcccgccgggcacacttctacgcagccaggtagaccgcctttatcgagacgttccacacctttctggttgcacagctcgcacttatgcagcgcaccaaacgggttgttgtagtcgtacttcggcacgttgtacggacaggcgaccatgcagtaacggcagccggtgcacacatctttgtcgtaatggacaatgccggttttcggatcttttttcagtgcagagaccgggcacacagagacacagttcggatcgacgcagtgcatacactgtttcttaatgtacgcgtagccgttctcctcctggtctttgttgacccctgtgccgctggtccacacctgaatgatgttattggtatacggcgacagtttgtcgttgttcgaccaggtctgttccccttgcgggttacgttcagggaaattgatatcctgacacttggtgacgcaagcctggcagcctacgcacaaggtcgagtcgtacaacatccccagcgatcccggaattggcgggcggttttcagcagccgcatgactgacagacggcagcgcgcccgtcagcaatgccccgcaggaggctgctttaataaaattacgtctgttcacggttattctccccgtgagtcagcgttatctttcttttgctgacgacccagttcacgcaccgccatcacgctgacaccggcaaccaacccaaccacaccgccgagcaaaccaatagcgcctgcagagacgttgccgccctctttagcgttaacatccggtttctgtgaacgcggagtttgattttcgacgttggcaagctgatggatgcctttatggaagccgataccttcttcgttacagccatagcaagggtgaccaatcgccaccggccacacaccgccaacatcgcagaattgcagcgttgagcagttgccgtaagtttctggccctttacagccgaggtggtacaggcaccagccttcgcggtggccttcatcaccgaactctttggcaaaacgaccagcatcgaagtgcgggcgacgttcgcagtgttcgtgaatcagacggccataggcgaaggtcggacggtttttgtcatccagtttcggcggtttgccgtaagtgatgatgtgcgcaacggtcgcgaggaagttgtgcgggttcggcgggcagcccggaatattgataacggttttgcctggcagaacttcttgcaggctgactgcgccagttgggttaactccagctgcggcaacaccgccccacgcagagcaggaaccgatagcgataatggctgctgcgccttccgccgctttgcggatgtgatccacaatcggctcaccggcaaccatgcaataaataccgttatcttttaatgggatggaaccatccaccactaacacatactgccctttgtacttctcgagagcgttatgtttgttctcttcgacctgatgaccgaaggcggcggaaagcacttcgtgatactccagagagatagtctccagtacgaggttttctaccgttggatgcgttgcacgaagcagagattccgtacaaccggtgcactcctgcgcgccaatccagataactggcggacgctgcgggttagtaaccgattcggccatctctgcagcggctttgctacttaaccccatggtggcggctaatgctgcacaaagcttcatgaaatcacgacggttaatgccgtgagaatggatgagggtgttatctccagtcatttatagttattccgttgcgaagacctggcatatattttgcctcaatcgcaaaatcaataatgcgatcgatgcgccatttaccacacatttattatggttatcgatatcatgatactgcggcggggcgctaaaacgaagggaagaagcattagtgtaattaattaaagcaagataatacgtatgtttgatcaattttcgaggcgataaccggccataaaaaagcgcaacgtagaacaggaattattctcacgaaagaaatccattaccatctctttatccagtccatagcggcgcgtcagaatacccgcttcccaggcgctaagctggcgatctccggtcttttcgtacatccggtgtgagtagcctaatacaaaaccgcgtttataatcggcacagaattttgtcacattaaccgcactgtcggcatgcgttgcttttaatcccgccattaagcctttaccaaaatggttattcatcgttcacctcattcgctatatattgtcatatatagcgatattttaggcaaagaacgacttttgcgcacgctattttttcatgcttgtttaagacgtaatcccgtaagagataaacctatcaggagagatatttatcgaaccatttcagtgtcctttgccaggcaagatcggcggcagatttgtcataacggggcgtggaatcattatggaatccgtgattaacccccggatagatatacgcctcataaaccttattattggctttcaacgccgcctcgtaagcaggccagccctcgttgattcgggtgtccagttccgcgaagtggagtagtaaaggcgcttcaatcttcgccacatcggcagtgggtgcctgacgaccataaaacggcaccgcgcaggccagttccggatacgcgacagccgccgcgttcgatacgccaccgccatagcaaaatccggtaatacccactttgcctgtcgcttgcggatagcgttgcataaactcaattgcggcaaagaaatcattcatcagtttgttggatcaacctgctgttgcagctcacgacctttatcatcatttcccggataacctccaacggaacttaagccgtcaggtgccagggcgatataccccgccttcgccactcgccgtgccacatcttcgatatacggattcagtccacgattctcatgcaccaccactacggctggcgttttgccgctcatctttgcgggcttcaccagataaccccgcacctcgccgtgaccatttggcgaaggatacgtgatgtactcagcaacaatttccgggtcggtaaactctacctgagtcgccagcgcataatttggcttgagcaaatcaaacaacgctaatgccgtcatcccgcctaccgcacttcgccgcaaggttgaggaactcacgtttcgagattttcccgtgagcgtaatagtcatagtaatccagcaactcttgtgggaaatctttggcggttaaacgcggcatcgttgcactcctcagttggtgtttttttaagcaaagcataagcacgtatttttgcccagtttttcgtcactctgtgagccagactacgggatacgcgctggcgaatcgctaaactagaaacattgtttcgaaattgaacggtggaaaggagaggtcatggtctggttagcgaatcccgaacgttacgggcagatgcaataccgctattgcggaaaaagtggtttacgcctgcccgcgttatcgctcggtttatggcacaatttcggtcacgttaacgcgctggaatcacagcgtgcgatcctgcgtaaagcgtttgatttgggcattacgcactttgatttagccaacaattacgggccgcctccaggaagcgcagaagagaactttggtcgcctgctgcgggaggattttgccgcttatcgcgatgaactgattatctctaccaaggctggctacgatatgtggcccggcccttacggctctggcggttcacgtaaatacctgctcgccagcctcgaccaaagcctgaagcgtatggggcttgagtatgtcgatatcttttactctcatcgcgtcgatgaaaatacgccgatggaagaaaccgcctctgcgctggctcatgcggtacaaagcggtaaggcgctgtatgtcgggatctcctcttactcgccagagcggacgcaaaaaatggtcgagttgctgcgcgagtggaaaattccgctgttaattcatcaaccttcgtacaatttactgaaccgctgggtggataaaagcggcctgctggataccctgcaaaataacggcgtgggctgtattgcctttactcctctggctcagggattgctgaccggaaaatatctcaacggcattccgcaagattcacggatgcatcgtgaagggaataaagttcgtggtctgacaccgaaaatgcttaccgaagccaacctcaacagcctgcgcttattgaatgaaatggcacagcagcgtggacaatcaatggcgcaaatggcgttaagctggttgctgaaagatgatcgcgtgacgtcggtattgattggtgccagccgcgcggagcaactagaggagaacgtgcaggcgctgaataatctgacatttagcaccaaggagctggcgcagattgatcagcatatcgccgatggcgagctgaatctgtggcaggcgtcttccgataaatgacctgttaataacgggcgcgcgaaccgcgcccgaatcagatcagtgattatgacgagtcagtcggtcaagatagcccatcacaaatgcagaaagcacaaacgtcagatggataatgacgtaccacatcagtttgttatccgggacatttttcgcatccataaagacgcgcagtaagtgaatggaagaaattgccacaatcgacgctgctactttgtttttcagcgacgttgcgtccattttccccagccagttcagcttctctttgttctcggagatatccagctgtgagacgaaattctcataaccggaaaacatcaccatcaccagcaaaccgccaaccagcgtcatatccaccagcgacagcaacacgaggatcaaatctgattccgccatcgagaagatattcggcagtacgtgaataatctcctggaagaacttcagcgccagggcaactaacgccagcgaaaggccaaagtacacgggggcaagcagccagcgagaagcatacattgcattttcaagaaaacgttccatacattcctgtcgtgtagttaaaacgggcaacagtatatcgcaattgagtaaacagcacgcaacagcaaatcaacatatacgttaaacctttgtcgcataattctgaggtttagggatcttcctggttcccttatcaacgcatcgagaacgtctacccttaaaggacgttgaacctgaagggagaaaaacgatgtctcatttaaaagacccgaccacgcagtattacactggtgaatatcccaaacagaaacaaccgacgccaggcatccaggcgaagatgacaccggtaccggattgcggcgagaaaacctatgttggtagcggtcgcctgaaagatcgtaaagcactggtgacagggggcgattccggaataggtcgcgctgccgccatcgcttacgcgcgtgaaggggctgacgtggcgatcagttatcttcccgtggaagaagaagacgctcaggatgtgaaaaagatcattgaagaatgcggacgcaaagccgttctgctgccaggcgatttaagcgatgagaaatttgcccgttcgctggttcacgaagcgcacaaggcgttaggcgggctggatattatggcgctggtcgccgggaaacaggttgccattccggatattgcagacctcaccagcgaacagtttcaaaagacctttgccattaacgttttcgcgctgttctggctaacccaggaagcgatccccctgctaccgaaaggtgcaagtatcatcaccacttcgtcaatccaggcataccagccaagtccgcatttactggactatgcggctacgaaggcggcgattctgaactacagccgtggcttggcaaaacaggtcgcggagaaaggtattcgggtgaatattgtcgcgccaggcccgatctggacagcactgcaaatttccggcggacaaacgcaggataagatcccgcagtttggtcagcaaacgccgatgaaacgtgcggggcaaccggcggaactggcccctgtatatgtttatctggcaagtcaggagtcgagctacgtcaccgcagaagtgcacggcgtgtgcggcggcgagcatttaggttaaaaaaatgcccggttgtgaaaagcaaccgggcatcattgtgaattcactcttacctgatgtggcgaaaacgccttatccgcctacaaacgcatgaagattcaacatgttgcaatagattttgtaggcctgataagcgtagcgcatcaggcattgagcacctaatgccggatgcgtcgtgaacgccttatccggcctacaaacgcacgaagattcaacatgttgcaatagattttgtaggcctgatgagcgtagcgcatcaggcaattctactttacttcgctttggcggtttcttcgccgaccagacctatcttcaggtaacccgcctgatgcagcgtatccattaccttcatcaacgtctcgtaatcgacggttttgtccgctcggaagaagatggtggtgtctttcttgccttcggttaacgcattcaacgccgtaatcattgtttcatcggtgaccggatcgttaccgataaacatcgagttgtctgccttcaccgacagataaaccggtttttccgggcgcggctgcggcgtgctggtagaagcaggcaagttcaccttcacatctaccgtcgctaacggtgccgccaccataaagataatcagcagaaccaacatcacgtcgataaacggcgtcacgttgatatcatgcatttcgccgttatcgtcgaggttttcgttaagatgcattgccatcggatattatcctgcgcgtaatttttgtgcgacacgaaccggatgcgcagcggcgctggcttccagatccaggtcacggctttgcagcaacaatacctgcgctgcaacatcacccagcatcgctttaaagccgccaatctggcgtgcaaatacgttatagataacgaccgcaggaatcgctgccacgaggccgattgccgttgctaacagagcttctgcgatacccggcgcaacgactgccaggttagtggtctgcgtttgcgcgataccaataaagctgttcatgatgccccagaccgtaccaaacagaccaacgaacggagaaatcgcgccgatggttgccagatagccgttaccgcggcccatttgacgacccactgcggcgacccgacgctccagacggaagctggtacgttctttaataccttcgttatcgtcgctgccttctgacagttccagctcattctgcgcttcattgagcaaatgcaggcttaagcttttgctaccaaaatcagcggcgatatcgttggcctggtttaaggaacgcgcttcagccagcagttgctgctcgcgcttaaggcgacgcttctgattgaagaactctacgctcttactgaagaagattgcccaggtgactacggaggccaaaataagcccaatcatcacgcacttaacgacaatatcggcgtgctgatacataccccagacggaaaggtccgtctgcattaaattattacccactgtgtatctccaggacgcaagtcacaaaatctgcgcataataatatcaaaacgacgtcgaattgatagtcgttctcattactatttgcatactgccgtacctttgctttcttttccttgcgtttacgcagtaaaaaagtcaccagcacgccatttgcgaaaattttctgctttatgccaattcttcaggatgcgcccgcgaatattcatgctagtttagacatccagacgtataaaaacaggaatcccgacatggcggacaaaaagcttgatactcaactggtgaatgcaggacgcagcaaaaaatacactctcggcgcggtaaatagcgtgattcagcgcgcttcttcgctggtctttgacagtgtagaagccaaaaaacacgcgacacgtaatcgcgccaatggagagttgttctatggacggcgcggaacgttaacccatttctccttacaacaagcgatgtgtgaactggaaggtggcgcaggctgcgtgctatttccctgcggggcggcagcggttgctaattccattcttgcttttatcgaacagggcgatcatgtgttgatgaccaacaccgcctatgaaccgagtcaggatttctgtagcaaaatcctcagcaaactgggcgtaacgacatcatggtttgatccgctgattggtgccgatatcgttaagcatctgcagccaaacactaaaatcgtgtttctggaatcgccaggctccatcaccatggaagtccacgacgttccggcgattgttgccgccgtacgcagtgtggtgccggatgccatcattatgatcgacaacacctgggcagccggtgtgctgtttaaggcgctggattttggcatcgatgtttctattcaagccgccaccaaatatctggttgggcattcagatgcgatgattggcactgccgtgtgcaatgcccgttgctgggagcagctacgggaaaatgcctatctgatgggccagatggtcgatgccgataccgcctatataaccagccgtggcctgcgcacattaggtgtgcgtttgcgtcaacatcatgaaagcagtctgaaagtggctgaatggctggcagaacatccgcaagttgcgcgagttaaccaccctgctctgcctggcagtaaaggtcacgaattctggaaacgagactttacaggcagcagcgggctattttcctttgtgcttaagaaaaaactcaataatgaagagctggcgaactatctggataacttcagtttattcagcatggcctactcgtggggcgggtatgaatcgttgatcctggcaaatcaaccagaacatatcgccgccattcgcccacaaggcgagatcgattttagcgggaccttgattcgcctgcatattggtctggaagatgtcgacgatctgattgccgatctggacgccggttttgcgcgaattgtataacattgccacttttggacaattttgcagacattttattgtgaaaagtcttaaattgttgcgtccgggatcaaggcgtcccggacgattcaggagtacaataggcagataaaggcttaaacgctgttccacaggaaagtccatggctgttattcaagatatcatcgctgcgctctggcaacacgactttgccgcgctggcggatcctcatattgttagcgttgtttactttgtcatgtttgccacgctgtttttagaaaacggcctgctgcccgcctcatttttgccaggcgacagcttgttgatactggcaggcgcattgattgcccagggggttatggattttctgcctacgattgcgattctgaccgccgcagcaagtctgggctgctggctaagttatattcaggggcgctggttagggaataccaaaacggtgaaaggctggctggcacagcttcctgctaaatatcaccagcgcgccacctgcatgtttgaccgccacggtctgctggcgctgctggctggacgttttcttgcatttgtccgtacgctgctgccaaccatggcgggaatttccggtctgccaaaccgccgcttccagtttttcaactggttaagtggattgctgtgggtcagcgtggtaaccagttttggctatgccttaagtatgattccgttcgttaaacgccatgaagatcaggtaatgacgttcctgatgatcctgccaattgccttgttaaccgctggcttgttaggcacgctgtttgtggtgattaaaaaaaaatactgtaacgcctgacgattttccccgttcccggttgctgtaccgggaacgtatttaattcccctgcatcgcccgcattcttgccgcatcttcccccggcgtcacaccgaagtaacgtttaaactcacggctaaattgcgatgcgctttcatagccgacgcgcatcgctgctgcgctggccttcatgccgtcatggatgatcatcatccgcgccttatgcagacggtaattcttcaaatactgcaacggcgaggtactggtgacagacttaaaattatggtggaacgccgatacgctcatgttggcttctgccgccagttgctcgacgctcaggttttcggtgtatttattctcaatccgtttcagcacgcggctaatcagactgaagtgagtctggcgactgaccagcgccagtaacgcgccgccgcaaggtccggtcagcacgtagtacagaatttcgcggatgatctgtttgccgagaatacgcgcatccagtggtcgctccatcacgtcgagtaaccgctccgccgcgcataaaatctcttctgataacgtggcggagttaatcccgctggctgccatcgacggctggaaatgctcatcttcgccaatgtccatcaacagttcctgtaactgcaaaatatcgacattgagacgcaaccctgccagcggcacctctgacgtggcataggtttcgcactcaaacggcaacggcaccgtcagcagcaggtattcattggcatcataacgaaacacgcgttcattgatataaccgattttatgcccggaaaagagaattatgatgccaggctcgtacatcaccggtgtacgtgcgaaaggcgtctcgccatacaacaaacgcacatcgggcaacagtcctgacaaactattttctttatttttcagtttattaactttatccgccagcaagcggcaaatctcttcacgtttcatatcgcgtaatttcttaggaataatgcggcaatttgattgtgcgcaattttgtagcatttctccagcactctggagaaataggcaagacattggcagaaatgagcattgagagccagggcgctggcgatcacaatgaaaaacatcaggcagatcgttctctgccctcatattggcccagcaaagggagcaagtaatgaacaactttaatctgcacaccccaacccgcattctgtttggtaaaggcgcaatcgctggtttacgcgaacaaattcctcacgatgctcgcgtattgattacctacggcggcggcagcgtgaaaaaaaccggcgttctcgatcaagttctggatgccctgaaaggcatggacgtgctggaatttggcggtattgagccaaacccggcttatgaaacgctgatgaacgccgtgaaactggttcgcgaacagaaagtgactttcctgctggcggttggcggcggttctgtactggacggcaccaaatttatcgccgcagcggctaactatccggaaaatatcgatccgtggcacattctgcaaacgggcggtaaagagattaaaagcgccatcccgatgggctgtgtgctgacgctgccagcaaccggttcagaatccaacgcaggcgcggtgatctcccgtaaaaccacaggcgacaagcaggcgttccattctgcccatgttcagccggtatttgccgtgctcgatccggtttatacctacaccctgccgccgcgtcaggtggctaacggcgtagtggacgcctttgtacacaccgtggaacagtatgttaccaaaccggttgatgccaaaattcaggaccgtttcgcagaaggcattttgctgacgctaatcgaagatggtccgaaagccctgaaagagccagaaaactacgatgtgcgcgccaacgtcatgtgggcggcgactcaggcgctgaacggtttgattggcgctggcgtaccgcaggactgggcaacgcatatgctgggccacgaactgactgcgatgcacggtctggatcacgcgcaaacactggctatcgtcctgcctgcactgtggaatgaaaaacgcgataccaagcgcgctaagctgctgcaatatgctgaacgcgtctggaacatcactgaaggttccgatgatgagcgtattgacgccgcgattgccgcaacccgcaatttctttgagcaattaggcgtgccgacccacctctccgactacggtctggacggcagctccatcccggctttgctgaaaaaactggaagagcacggcatgacccaactgggcgaaaatcatgacattacgttggatgtcagccgccgtatatacgaagccgcccgctaagctttttacgcctcaaactttcgttttcgggcatttcgtccagacttaagttcacaacacctcaccggagcctgctccggtgagttcatataaaggaggaacgtatggctaatccaaccgttattaagctacaggatggcaatgtcatgccccagctgggactgggcgtctggcaagcaagtaatgaggaagtaatcaccgccattcaaaaagcgttagaagtgggttatcgctcgattgataccgccgcggcctacaagaacgaagaaggtgtcggcaaagccctgaaaaatgcctcagtcaacagagaagaactgttcatcaccactaagctgtggaacgacgaccacaagcgcccccgcgaagccctgctcgacagcctgaaaaaactccagcttgattatatcgacctctacttaatgcactggcccgttcccgctatcgaccattatgtcgaagcatggaaaggcatgatcgaattgcaaaaagagggattaatcaaaagcatcggcgtgtgcaacttccagatccatcacctgcaacgcctgattgatgaaactggcgtgacgcctgtgataaaccagatcgaacttcatccgctgatgcaacaacgccagctacacgcctggaacgcgacacacaaaatccagaccgaatcctggagcccattagcgcaaggagggaaaggcgttttcgatcagaaagtcattcgcgatctggcagataaatacggcaaaaccccggcgcagattgttatccgctggcatctggatagcggcctggtggtgatcccgaaatcggtcacaccttcacgtattgccgaaaactttgatgtctgggatttccgtctcgacaaagacgaactcggcgaaattgcaaaactcgatcagggcaagcgtctcggtcccgatcctgaccagttcggcggctaacatgcaaattctcccggtggcggtaatgttccgctaccggacttttcagaaatcatttattcccctcgcgtcccgcccgttgttactcttccttgttcaggaatgccaaatataaggacatcatcatgcagagccggaagctcttaaaagaacaactcatctatatccgggataaacgcaacggagaggtgaaaaacagatgaaaataatacttctgtttttagcagccctggcaagttttaccgtacacgcacagcccccctcacagaccgtagaacaaacagtccggcatatttatcagaactataaatcagatgccactgccccttattttggtgaaaccggagagcgggcgataacttctgcgcgtattcaacaggcgcttaccctgaacgacaatcttacgctgccgggcaatattggctggctggattatgatccggtttgtgattgtcaggattttggcgatctggtgctagaaagcgttgcgataacccaaactgacgccgatcatgccgatgccgttgtgcgctttcgtatctttaaagatgataaagaaaagaccacgcagacactgaaaatggtggcggaaaatggtcgttgggtcattgacgatattgtcagcaatcatggcagcgtcttacaagcagttaatagcgagaatgaaaaaacgctggccgctttagcttcgttgcaaaaagaacagccggaagcctttgttgccgaactctttgaacatattgctgattatagctggccgtggacgtgggtggtttccgactcttaccgccaggcggttaatgccttctataaaaccaccttcaagacggccaataatcccgatgaagatatgcaaatagaacggcaatttatttacgacaatccgatctgttttggcgaagagtcgctattttcacgcgttgatgaaattcgagtcctggagaaaaccgccgattccgcccgcattcatgttcgttttacgctgaccaatggcaacaacgaagagcaagaactggttttacagcggcgcgaaggcaagtgggaaatcgctgattttatccgcccgaacagcggcagcctacttaagcagattgaggcaaaaactgccgccagattaaagcaatgagctgaattaaataacaattagccggaacaataaataaaagggaacactatatgaaaacgattttcaccgtgggagctgttgttctggcaacctgcttgctcagtggctgcgtcaatgagcaaaaggtcaatcagctggcgagcaatgtgcaaacattaaatgccaaaatcgcccggcttgagcaggatatgaaagcactacgcccacaaatctatgctgccaaatccgaagctaacagagccaatacgcgtcttgatgctcaggactattttgattgcctgcgctgcttgcgtatgtacgcagaatgataaaaaaatccccggtagcgtgtcagttgccggggatattttttaacgtccaaccgccgctttaggccgtttcttcgcaccagcattcaccggacgagattgcgtagacgacgctttttttgccgtagcaggcgtctgacgctgggtcgccatcggcgtatgtttcgtcaacgccggacgggtattgcggttctggcgacgagcttcacgcatctcttcaatggttggcgcaggcactaagcaatcgcgacggctgccaatcagatgctttttgcccatcgcttccagcgcctggcggattaacggccagtttgccggatcgtggtaacgcaacaacgctttatgcaaacgacgctgtttgtcgcccttcggtacgaagacgtcttcgctcttataaccaatcttcgccagcgggtttttcccggtgtaatacatggtggttgagttcgccagcggcgacggatagaagttctgcacctggtcgaggcggaagcggtgctttttcagccacagcgccagattcaccatatcttcatcacgcgtaccggggtgcgcggagatgaaataggggatcagatactgctctttacctgcctgttttgagtaagtatcgaacagctctttaaagcggtcatagctgcccatgcccggcttcatcatcttcgataacggcccttcttcggtatgttccggggcaatcttcagataaccgccgacgtgatgggtcgccagttctttgatatagcgcggatcttctacggctatgtcataacgcacaccagaggcaatcaggatctttttaatgcctttcagatcacgcgcacggcgatagaggttgatcgttggttcgtggttcgtgtccatgtgcggacaaatatccggataaacgcacgacaaacggcgacaagtttgttcagcgcgtggcgatttgcagcgcaacatatacatgttggcagttggcccaccaagatcggaaatcacgcccgtaaaacctggaacggtgtcgcggatcgcttcgatctcattaatgatcgaatcttcggaacggctctgaataatgcgcccttcgtgctcggtgatagaacagaaagagcagccgccaaagcagccacgcataatgttgaccgaaaaacggatcatttcgtaagccggaatacgggcattgccataggccggatgtggcacgcgcttgtatggcagcgcaaaaacgctgtccatctcttcggtagaaagcggaatagcaggcgggttgatccacacatagcggtcgccgtgtttttgcatcaatgcgcgggcacagcctgggttggtttcgtggtgcagaatacgcgaagcatgggcgtacagcactttatcgcccttcactttctcgaaagaaggcagcaacacgtaggttttttcccacggtttcgggcgcggtggctgcacggttacggctttggcttcctgctttttcggtgccaccggtttgttatccgcgcacggcaaatcttcaccatacggatgcgggattgggtcgatttttccaggggtatcaagacgggtggaatccacgccgctccagccaggcagcgcctctttcacgataatcgcggtattacgcacatcgcggatttcactaattggctcgcccatcgccagacgatgcgccacttccaccagcggacgctcaccgttaccaaacatcagcatgtcggctttcgaatccaccagcacggaacggcgcacggtatcggaccagtaatcataatgcgcggtacggcgcagactagcctcaataccgccgaggatcaccggtacatctttccacgcctctttacaacgctgggtataaaccagtgtggcgcgatccgggcgcttacccgcgacgttatccggcgtgtaggcatcgtcatgacgtaaacggcgatcggcggtataacggttgatcatcgaatccatgttgccagcagtaacaccgaaaaacagattcggtttacccagacgcataaagtcgtctttgctgctccagtccggctgggcgatgatcccgacgcgaaagccctgcgcttccagcatacgaccgcaaatcgccatcccgaagcttgggtgatcgacatacgcgtcgccagtaaccaaaatgatgtcgcagctatcccagccaagttgatccatctcttcacgagacatcggcaaaaacggtgccggtccaaaacaggcggcccagtactgcggccaggagaacaggtcgcgatccggttggatcagggagatagagctcattttgcttccagaaatgataaaaaaataatcaaaggccggggattataagccggaacgaaagagaaatcgaaaggtattccatactcgccctcctcgggcgagtatgaagattacggtaccggattgaccaacagttgcccaatcgagccacggtccgccatttccagcgtctgactgttgaagtagaacgggaagtgcgcccaggaaggctgaccgaaataaacaagcagctccacttgtccgtcaacccaaacggtatctttccagcctctgtcttccgggaacggcatcgcgccattcacgttacggatctggaacattacgccttcaatatggaacgcttgcggctcgtccgcgcgtaccgtccagcgttcccacgttccttgctgcgcggtgacatcaatacggttgacgtcccacagctgtccattaatacccgggtcatcacccagactgatatcgcgactgcgaattggcgaaccagccatgatttcagttggcagcaagcgcatcggaagactgtctgtgaccagcggcagaaggccggttgggcgcagcgttagcaccagggtagaaaccagaatactggatggctcaaagaagccacgaatacgatcaacaatgctcgccgcttcgccacaggtgatcgacacttcatcgccgttgctcatatccaccagaatctcgcggcgctcgcccggtgccagcgaaagttgcttcaccgatacaggagcaggcaggaatccctgatcgccagaaatcacatgtaacgggcgaccatcgttcatctgtagttgatagcgacgagagttcgacgcgttcagcagtcgcaagcgcacccagccacgcgagacttcaacgtacgggctttgtacaccgttaaccagcagcgtatcaccaacaaagccgccgcttcccggttcgttgtattctggcgtaccaaagttatccagccgtttatcctggataatgaccggaaaatcatccacaccataatggttggggataggcagcgacttgctgacttcatcttccaccagccacattccggcaaggccgttatagacctgctgagccgtgcggttgggagtattggcgtgataccacagagtagctgcgttctggcgaatgggcagtacgggtgcccagtcagcgtttggcgacatcatccgtgccggaccgcccatcagcgggcctggtacctgtagcccggccaccgtcattgagacattttctgtcaggcggttgctgtaaataagcttaacatcgtcgcccttccagacgcggatagtcggccccaggtaacgaccattgattccccagaccgacgcgcgtgtccctggcgtaaatgaccagtgcgcacgttgtacagtcataaacagcggttgcccacggcgagattcaagtagcggcggaacgggtagcggttgctgttgcccggctgcgctggccttcaggggaacagcgcctgcacaaagtgcaatccccgatgcctgaatgaactgacgccgactgagtgacatatttgctccatgtaaaactggctaaagtaataccgtgcaggaaagtgttccccgcaaaaatacagattgccgacttaaacttttccggcggcttcgcgttctgcgacttctttatcgagctcggcgattttttgttccattatcgaacgacaatgggcagccagctcacgaacctgatctttgccatactgactgacgtcaattggcggcagcatttcgacaatcaccagaccgttgtgcagtcgattaagattaatcttattcgaagttgtagagacgcacacgggaataatcgggacgcccgccgcaattgccgcgtgaaatgctccagtcttgaacggtagcaggccgcgaccacggctgcgggttccttccgggaacatccagatggaaatacggcgttttttgaagtgattcactacttccgcaatggtgccgtgagctttagtgcgattgtttctgtcgatcaataagttgccggttaaccagtacaactgcccgaagaaggggatccacagcaagctctttttacctaccgtcaccgtcggcggttgcacgatgttcgatgctgtcaccatgtcatagttgttctggtggttagcgatatagatagcattgccgtagctttcagcgtctgtaggtttacggcactcaactttcaggccaaacagcggcgcaagacggccaaacatatgcccaaaggtggccacatgtttcgggttacgcgggctgaaaaggcagtaaatggagccgaatacacagactaagatgctgtaaatcacggtaataataagacgaaagatatatagcataacaccctctgaaggtctgagagactggcattgtacgtcacctgaaatcaggttagggcattgttaaaagccgctctctggaaaagcgtattgttaatcgcaacgcatgaataaacaacggtttcaagggaatttttatcgtttccgggggttgaatacgctgccggatgacgacttaacgtttcatccggcgttccttgcaagcgggaggaaacagcgccctccccggcatattactcttcgctatcaccgctgctggcacggcgaggagagtcgatctcaacacgatcgatacgctgcaaaccgcgcatcaacgtaccgcggcgtccacgttcgccagtgactttctgtaactcttccgggcgcagtttaattttgcgtttcccaacatgaatggtcagcgtgctttgcggcggcagaacgtacaattgcgccagaccatcttctccacgcgcggcttctgccgatggaatgttgataatcttgttgcctttgcccttcgacagctgcggcagatcacttaccgggaacatcaacatacggcctgcctgagtgattgccagcagcatatcggaagcatcttcaatcaccaccggcggcataacatgggcattttccggtaaggtgatcaaagccttacctgcacggttacgcgccaccagatcgttaaaggtgcagacgaaaccgtaacccgcatcggaagccatcagcagtttctgatcgtcgctttccatcagcatatggtcaacggtcgccccaggcggcaacgttaatttgccggtgagcggctcgccctgaccacgcgccgacggcagcgtaatcgggtcaatggcatagctacgaccggtggaatcaacaaacactaccggttggttgctcttacctttcaccgccgctttgaagctatcacccgctttataattcaggcccggcgcgtcgatatcatggcctttagcgctgcgtacccagcccatctgcgacagcacaatggtgacaggttcagacggcagcatgtcgtgctcgctcatcgctttcgcttcttcgcgttcctgcaacggcgaacgacgatcgtcaccgtaggcttgcgcgtctgcctgcagttctttcttcagcaggttattcattttacgctcggaagccaaaatgccctgcaactggtcgcgctctttttccagttcactctgctcaccgcgaatcttcatctcttccagtttggcaagatgacgcagtttcagttcgaggatcgcttccgcctgggtttccgtaaggccaaaccgcgacatcagcgccggtttcggttcatcttcattacgaatgatctcaatcacttcgtcgatattgagaaacgccaccagcaaaccttcgaggatatgcaggcgcttgaggactttctccagacgatagttcagtcggcggcgcacggtatcgcggcggaacaccagccattcggagaggatttccagcaggtttttcaccgccggacgaccatccagaccgatcatattaaggttaatacgatagctcttttccagatcggtggtagcgaagaggtggttcatcacctgatccatatccacgcggttggaacgcggcacaatcaccaggcgggtcgggttctcgtggtcagattcatcgcgcagatcgtcaaccatcggcagctttttgttgcgcatttgcgcagcaatttgctccagtacgcgcgcacctgaaacctgatgcggcaatgcgctgataaccaccgcgccatcttctttcttccacaccgcgcgcatacgcactgaaccacgtccgttctcgtagattttacggatctcggcgcgcgaagtgataatttccgcttcagtcggataatccggcccctgcacgatatccagcagctgatcgagcgtggttttcggctggtcgattaatgcgattgccgcctgagccacttcacgcaggttatgcggtggaatatcggtcgccatgccgacggcaataccggtggtgccgttaagcaaaatgtttggcagacgggcaggtagcattttcggctcctgcaaagtgccgtcgaagtttggcacccagtcagccgtcccctgccccagctcgctcaatagcagctcggaatatttcgacaaccgggattcggtgtaacgcattgccgcgaacgatttcggatcgtccggcgcgccccagttcccctgaccatcaaccagcggataacggtaagagaacggttgcgccatcaggaccatcgcttcataacaggcgctatcgccgtgcggatggtatttacccagtacgtcaccgacggtacgggccgattttttaaatttggcgctggcattcaggcccagttcagacatcgcatacacaatgcggcgctgaacaggtttcagaccatcaccaataaacggcaacgcacggtccatgatcacgtacatggagtagtttaagtaggcgttttccgtaaattcatgtagcgcaaggcgctctgccatatcgctcattaattctgattcctcaacttattcgccagccttcaaaggggcaatattgccggagatactacattatctgccgcgtcgagtcacaggagatcaacgtgaatagcgccgccggacgtgctccgacggcgataaaggcatcaatgtgccttgatatacaactctttgctgtagacataatcctggggattatgcagcggaaaaccgccaacgtagggtttaagcagtttgattaacggctgatagtagataggaatcagcggtgcctgttggttgatgatcacttctgcctgctgatacaacgcattacgctttgtcgcatcagtgatctgcgtggcctggtttagtaaggcgtcatactgcgcatttttccagtgaccgacgttttcttcactatcgcttttgagcgtgttcaggaagctggaagcatcattgtacgtcgcatcccacgactgccgagacagcatgaaatcaccggctcgtcgggcatcaagataggttttccactccattgtgcgcagcgtcacctgtgcacccagccattttttccattcggaagacaacgctatcgcggtcttttcatgcagatcgtacttgttgtagaacagctcaaagcgtagcggatgagaggcgtcgtatcccgcctgtttcagcaaggcttttgccatcgcgacgcgctcactcattggcttttgcagttcatcgaacgtcgtcgcgctaaagccttttacctctggcggcgtcagcgtggttgcgggcgttctcaaccccagtaccttttgcgcaataagctgtcgatcaaccgtaagatatagcgcccgacgcactcgcacatcgttaaatggcggtttctcaaggttgaagttgtaatattcgctgttcagacgcggaataattcgtagctcgccaggcagtgatttttcaatggcgggaatttgctgcgccggaacccaggtgagatcgacctctcccgcgcgatagcggttatagccggtgaccgaattatctagcgccagatactcaacctgttgcaatactgtatgttgcgcatcgcggtactttggatttttgcgtgcagtaatcttttcgttaactacccactgatcaagcacaaaggcaccgttgtaaaccatgttctctggcttactccagctatcgccatgtttagcgatgacatgatgaggaaccgggaacagcgtcggccaggcgagcatcgtcgtgaaccaaggaaccggctgctcaagcgtaacttcaagagtacgatcatccgtcgctttgacacccagcgatgtaacatctgctttacccgcaacaatagctgcggcattgttaatgtgcgcctgtgccagatagccagcaaaagggcttgccgttttcgggtcaaccgcgcgctgccagccgaggacaaaatcctctgccgtcagaggctgaccgtcggaccactgcaaaccgctacgcagatggaaaatatagcgcttgccgccgtccagtatctcccagcgttcagcctgagcgggctgcacctggccttcaccgtccatccataccagaccttcaaacagatccagcacaatctgcgcggcagtattctcctccaccttttgcgggtcgagcgtacctgggtcgctatgattgttgtaacgaaagacttgttgcggggcgagcggtgtgttggcgggaacgtcagcagcgtagagaggagccgcacttaccaggctgaccagccataataaatttcgcgtatacatggtattccttaccggagaaattataagcccaacaacaatacgcctgtggcattgttcgctcaaacttatcgcgagtgatttggctcacactccggtaaagaaaaaagcgagttgcccccgcttttccattaattaacggatttcattcaatagttctggatgcttatccagaacacgtaaaagtttgattgtggaaggatgaggttgggcattgcctttttcgtaacgcgaaaacgcatttacacctcccccaaaaatttcgcttgcctctttttgggtaagagagagcttttttcgaaccttcactataaattcaggtgccactgtttcggcattcaccgaagcccgaaatgcctttacttgcgccatgaaagcatctgactcttctttattcatgatgctctcttcgcaatggacacaatataaaccgtggatacctttcaatactgtttttcgtccacggaaggtgtatggaatatctttaatgccagaaaccatttctccctggtggcaaaccggacatttcatattacttctccttaaacgagacgatcagtacgtcatgaattaccgtaattttaagataaacctggcctgtaacaagcctgggtctgtaaacatcctgccagatagtatgatcagagtaggtggtcatgcttttataaaagtcgctctctgataatccaatgataacattacacataccatcaaaatccaaacctaactcatctgcatttaacagggcactacgtgttgtacgaacttgcccggcattgacaagttttttaacctgactcaaacgtgtatgtggtgtgcgtttttccataacccccgcctccctgttactttagttataacctaaaaggttaattacagcaatgaaaaagcacctaaaaggttagttagatgtacggagatagtgaccacacaaaacgtattctttaaggaaagtgattgaccatataagaaagtggcgcattagtagcgccagtttgaagcaggaatttataagggaagctggagtcaggcatcacgccaacggcacataaacatccgtttccagtcgctgctctgtcaccccttcggcaagattggtgtagtgaaacagaatcggtgctttacgcattttctcgccgcttgcaggcagccagtggcgaatgatgccccataccgtgtgtgaaatatcgtccagctcgccaacgtggcgggccacggcataacgtccaccggtaagttcaccattgctcacaccataacgattatcgggaatcggttcgctaacgctgccgcagatatcaaagcgaaacgcttccggtgcggtggtggcagggtcgtcccaggcgacgccaaaagtctggctttggttaacaggagaaagccccgtctctttacgccacatgataaatttcgccacgctgtagttgagcaattcagggctacagcggtgcggcaacatcgccacaggtattgatgggaaatcgataatgtttacatccagtgtcaggtttgtcattttgcctccctgcgaaattattcccgggaacgcgtcccgggagcggtaacaattacggatttactttgcggatctgtttgacgtcaatttcaacagaattccagtctttatcgacttcaccctgaatctcaaccgtatctttcggcgtcaccgtcacgccgttccagcgtttgtggtcgatatcaacattgatagtaccgctggcatctttgaacacgtagagatcgtcagagatgcgttcaacgatattgccgcgcagggttacccaggtgtcgtcacgcagggattttgcgctttctacagtcgttacgctgccgttcggcccctggaatcctccggcctgactttgcgttgccgatgggccagaaaaaccgccctgctctgctgccatcaccggtgcgctgcacagggccattactgcgattactgctgcgaattttttcatgtttattactccctttaatgtctgtttccgagcatttaacaagatagtccttaacaacttcttaagggaaaaaaataaaatttagtgctgtacagagcgcgttacaacacggtttactggcagcaaatacggttatcgcagggatgaaaaaatgcgaattttactgatagaagatgacatgctgattggcgacggcatcaaaacgggccttagtaaaatgggttttagcgtcgactggtttacacaaggtcgtcagggaaaagaggcgctttatagcgcaccttatgatgcggtgatcctggatttaaccttaccaggcatggatggtcgcgatattttgcgcgaatggcgagaaaaaggtcagcgtgagccggtactgatcctgaccgcgcgcgatgcgctggcggaacgtgtagaagggctgcgtctgggagctgacgattatctgtgtaaaccttttgcgttgatagaagtcgccgccaggctggaagctctgatgcgccgaaccaacggccaggccagcaacgagctgcgccacggtaacgtcatgctcgaccccggcaaacgtatcgccacgctggctggcgaacccttaacactgaaaccaaaagaatttgccctgctggaattactgatgcgtaacgctggtcgggtactgtcgcgcaaactgattgaagagaaactgtatacctgggacgaagaggtcaccagtaatgccgttgaagtgcatgtgcatcatctgcgacgcaaactcggtagtgattttattcgtaccgtgcatggtattggttacacattaggtgagaaatgaaatttacccaacgtcttagtctgcgcgtcaggctgacgctaatctttttaattctggcctcggtgacctggctgctttccagctttgtcgcctggaaacaaacaacggataacgtcgatgaattgttcgacacccaactgatgctgtttgccaagcggttaagtacgctcgatctcaacgaaatcaacgcggcggatcgcatggcacagacgccaaatagattaaaacacggtcatgttgatgacgatgcgctgacctttgccatctttacccacgacggcagaatggtccttaatgatggcgataacggagaagatattccctatagctatcaacgggaaggttttgctgacgggcaactggtcggtgaagacgatccttggcgttttgtctggatgacctcacctgatggcaaatatcgcatcgttgttggccaggaatgggaataccgtgaagacatggcgctggcgattgttgccgggcaattgatcccgtggctggtcgcactgccgattatgttaatcatcatgatggtactactgggtcgtgaactcgcgccgctgaacaaactggcgctggcactacgtatgcgtgaccctgactcggaaaaaccactaaacgcgactggcgtacccagcgaagtgcggccactggttgagtcgctaaatcaactgttcgcccgcacacatgcgatgatggttcgtgaacgacgctttacctccgacgcagctcacgaacttcgtagcccgttaacggcgctgaaagtgcaaaccgaagttgcgcagctctctgacgatgatccgcaggcgcggaaaaaagcactgctccaattacattccgggatcgatcgcgctactcgtctggttgatcaactgctcacgctatcgcggctggactcactggataaccttcaggacgtcgcggagatcccgcttgaagatctcctgcaatcgtcggtgatggatatttaccacacggcgcagcaggcgaaaattgacgtgcgactgacactcaatgcccacagcatcaaacgcaccgggcaaccgctattgctaagtttgttggtgcgaaatttgctggataacgccgtgcgctacagtccacagggcagcgtggtagacgtcacgctgaatgctgataatttcatcgtgagggataacggccccggtgtgacaccagaggcactggcgcgaattggcgaacgcttctatcgcccacccggacaaaccgctaccggcagcgggcttgggctatcgattgtccagcgaatcgccaaattgcatggcatgaatgttgaatttgggaatgcggaacaaggtggatttgaggcgaaggtaagctggtaacttctctgtctatgagagccgttaaaacgactctcatagattttactaatagcaaaatataaaccgtccccaaaaaagccaccaaccacaaaccagacaaataccgagcgagaatacatatacccaaaactcgaacatttcccgcataaagagttttcttaagataagaataataagtggcgtaagaagaaaaaatgctgcaatcattgcttgcaatatacgatcttcgcctgaaacggaaggtatactgcaaatatttcctcccgactcaagcatccagtcatacttattgaaagcaaaaaaagaatctattaaccaataagtaagcattatatatagcaatgcttcaaatattgttttaattttctgctttaacatatatcagtacgctcataaaaatccatttataattatcaacatgacacgttgatactttcatcttttacttattcaaagccatattttcaatccccaaaaaaaccgaaccaaacgtgtaaattattccggtgcgagtaagaattatgaggaatggctatcagtattgtcattttcagaaaatatttatcctgcatcggtgagtcagagtaagatcagacttttgctaaattcgcaaaagactttgcacattttgctaatttcaccgtaccgctctgtgacgtactatagtcggcaaacgtctcaccttgaggttaaaaaatgagcaacatcctgattatcaacggcgcgaaaaaattcgcccactccaatggtcaactgaacgacaccctgaccgaagtcgcggatggcacactgcgcgaccttgggcatgatgtccgcatcgttcgcgccgacagcgactacgatgtcaaagcggaagtacaaaactttctctgggctgatgtggtgatctggcagatgccaggctggtggatgggcgcgccgtggacagtgaaaaaatacattgatgatgtattcaccgaaggtcacgggacgctgtatgccagcgatggtcgtacccgcaaagatccgtcgaaaaaatacggttccggcggcctggtacagggcaaaaaatatatgctttctctgacctggaacgcaccaatggaagccttcaccgaaaaagatcagttcttccacggcgttggcgttgacggtgtgtatctgccgttccataaagcaaaccaattcctcggtatggaaccgctgccgacatttatcgctaatgacgtgataaaaatgcctgatgttccccgctatactgaagaatatcgcaagcatcttgtggaaatttttggttaactagagctcaggctttagaaggagttaaccatgcttaccgtaatcgcagaaatccgtactcgtcctggtcaacatcaccgtcaggcggtattggatcagtttgctaaaatcgttccaaccgtactgaaagaagaaggttgccacggctatgcgccaatggtggattgcgcagctggcgtgagtttccagtctatggcaccggattctatcgtgatgattgagcagtgggaaagcatcgcgcatcttgaagcgcatctgcaaaccccgcacatgaaggcgtatagcgaagccgtaaaaggtgacgtgctggagatgaatatccgtattctgcagccagggatttaatcctgccttgtttgcccggccatcctgaccgggcaatgttctttcctttaaacctcaatctccgccatgtcgcctttctcttgcaaccagttgcggcgatcttccgagcgtttcttcgccagcagcatatccatcatcgcgtcagtacgctgatcgtcttcatcatcgatagtcaactgcaccagacggcgagtgttcggatcaagcgtggtttcgcgcaattgcatcgggttcatttcccccagacctttaaaacgctggacgttcggcttgcctttcttgcgttttaattgctcaagtacgccctctttctcttcttccgtcagcgcgtaataaacctctttcccgagatcaatacggtagagcggtggcagtgcgacgtaaacgtgaccgtgtttcaccaacgcgcggaaatgttttacgaacaaagcgcagagcagcgtggcaatgtgcagaccatcagagtccgcatccgcgaggatacagattttgccataacgaagctggctcagatcgtcgctgtcaggatcgataccgatcgctaccgaaatatcgtgcacttcctgcgaagccagcacttcgtcggaagagacttcccaggtgttaaggatcttacctttcagtggcatgatcgcctgatattcgcgatcgcgcgcctgcttggcagatccgcctgcggagtcaccttccacaaggaacagctcggtacggttaaggtcctgcgcggtacaatcagccagtttgccaggcaacgccgggccgctggtcagctttttacgcaccacttttttggccgcacgcatacggcgctgggcgctggaaatcgccatctccgccagcagttcagccgcctgaacgttctggttcagccacaggataaaggcatctttcaccacgccagaaacgaatgccgcgcattgacgcgaagagagacgctctttcgtctgcccggcaaactgcggatcctgcatttttactgacagcacataggcgcagcgatcccagatatcttccgccgacagctttacaccgcgcggcagaatattgcggtattcacagaactcacgcatcgcgtccaacaggccctgacgcagaccattaacatgggtaccgccctgcatcgttgggataaggttgacgtagctttcggtcagcagttcaccgccttccggcagccacagtagcgcccagtccacagcttcagtatcaccagcgaaattaccgataaacggtttttccggcagcgtcggcagaccatttaccgcttccgccaggtaatcattcagaccgtcctgatagcaccagcgttgttcggtattgttgatctcatctttaaaagtgatctcaacgccagggcacaataccgctttggctttcagcacatgcgtcaggcgtgaaacagaaaatcgcgggctgtcaaagaaggtttcatccggccagaagtgcacactggtaccagtattgcgtttaccgcaagtgccgacaacctgtaaatcctgcaccttttcgccattttcaaaggcgatgttataaacctgaccatcgcggcgcacgttaacttctacgcgcttcgacagggcgttaaccaccgaaatccccacgccatgcaggccgccagagaactggtaatttttgttagagaatttaccgcctgcatgcagacggcaaagaatcagttcaaccgccggtacaccctcttccgggtgaatatccaccggcatcccgcgcccatcgtcaataacttctaacgactggtcagcatgtaaaataacgtccacgcgttttgcgtgacccgccagtgcttcatccacactgttatcaatgacttcttgccccaaatggttagggcgagtggtatcggtatacatccccggacggcggcgaaccggctcaagcccggtgagtacctcaatggcatcagcgttataagtttgcgtcatggtttaagttagtaattcgagttgatcgtcagagatggtgcagaccaagaaaatcgacgatcgggttgaaataatcttcgaagcccgtgaatgcgtggttgccgccttctatgacagtctggcggcaggaagcgtagtacgccaccgcctggcggtaatccagcacttcatctcccgtctgttgcagcagccagatcaaatccggcgcttccagcgggtcaatctgcatgactttaagatcgtaaatatggcgtgactctagcacatattgctgcccggtgtaggggttctcgttctgaccgagatagtccgtcagcagttcaaacgggcgcaccgccgggtttaccaccactgcgggcagcataaaacattgtgacaaccaggtggcgtaatatccccccagtgacgaaccgacaatacccagcgaatcaccgccatgttccaggacaatggattccagcagctctgccgcgtcggaaggatacggcggcaactgcggaatgatcatctcaacgtcagggtgatgttccgccagccagttttttaacaagctcgcttttgcagagcgcggcgagctgttgaaaccgtgtaaataaagaagcgtagacatcagtagccttctgaagcggtatcaggttggaaacgtgtgtccgccaggcgatgcacctcggtggtcagcgtgccatcagcatgtaactcgagagtacgccagccgggcgcgatggtatccagcgtaaagttggaacagtgcggcttaaactgcacacaggtcgacggcgttgccagcaggcggcgaccattccagtcgagatccagctcctgatgaatatgaccgcacagcaagtatttgacgtgcggaaacttcgccagcacggtatccagttcgcccgcgttacgcagactgtgttgatcgagccaactacaacccgcaggtagcggatgatgatgcagcagcagcaacgtatggcgttctggcgcatcggccagtttacgttccagccactcaagctgaaactcgctcagctcaccgtgcggcacgccaaacacctggctatccagcaacaggatttgccattgctcaccaataaacacgcgcttcgccggggagatacccgcatcctgtaacgcgctgtacatcgcgggctggaaatcgtggttgcccggcagccagacgcagggcgcacgaaaacttgcgatgccttcagcgaaatgctgataggccgcagaggattgatcctgcgctaaatcacctgtcgcgacaatcaggtcgaattcgtgctggtgtggccgaatcgcctccagcaccgcctggtaactctcccaggtgtttacccctaacagggcttcgtgcttttgtgcaaacaggtgagtgtcggtaatttgtaaaatcctgactctggcctcaccagccagaggaagggttaacaggctttccaaatggtgtccttaggtttcacgacgctaataaaccggaatcgccatcgctccatgtgctaaacagtatcgcaaccagtccgctaaaaactgattaatttgatgcttttcgtcgcgttgatgcaactttttattaggataatcataccgcgctttgaagcgaaaaatctgctggcttgaacacacttcagccaccatcgcgtcatgatacagacgcaccgtcattgacggaaggctccagtaactgatcgcgggcgcagtctgttctattgtcaccagggtagtgtatcgggtcgattccacaatcgtcagccgatattgtgcgtttgccacctgatagcttacagtttcgccgggtgcgtcattgcgcggtaacaaacggcgcaattgtgaaaagttcatctcgcacaggcgcatcatttcaggaaagtcaggtgtgtaacgcttcatttatgcccactcattttttaacgcttgatgatgcagctgcagccattgcaaagcgatgaccgacgctgcgttgtcgattttcccctcttctacccactggtatgcctgttcccggcttaccacatgaacgcgaatatcttcgttttcatcagccagaccgtgaataccgcttgcggtcgtggcgtccacttcgcccaccataattgacgaacgctcactggtgccccccgggcttgccaggaaacttaacaccggtttggtccgtttgactatcagtcccgcctcttcaatcgcttcgcgacgggcaacatcttccacactttcaccctcttcaatcatcccggcaaccatctccagtagccaaggggtttcgctggtgtcgtacgcggcaatccgaatctgctcaatcagcacaacttcatcacgcactgggtcaaagggtagcaagactgcggcgtgaccgcgctcaaaaatttcccgccgcacctcatgactcatttgcccgttgaatagacgatgacgaaatctataaagatctaatgaaaaaaagccgcgataaagtgtttctcgtgcaataatttctacatcgtttttgccaaatgtaacgggcaggttgtctggcttaagcattgttaatgtcctggcactaatagtgaattaaatgtgaatttcagcgacgtttgactgccgtttgagcagtcatgtgttaaattgaggcacattaacgccctatggcacgtaacgccaaccttttgcggtagcggcttctgctagaatccgcaataattttacagtttgatcgcgctaaatactgcttcaccacaaggaatgcaaatgaagaaattgctccccattcttatcggcctgagcctttctgggttcagttcgttgagccaggccgagaacctgatgcaagtttatcagcaagcacgccttagtaacccggaattgcgtaagtctgccgccgatcgtgatgctgcctttgaaaaaattaatgaagcgcgcagtccattactgccacagctaggtttaggtgcagattacacctatagcaacggctaccgcgacgcgaacggcatcaactctaacgcgaccagtgcgtccttgcagttaactcaatccatttttgatatgtcgaaatggcgtgcgttaacgctgcaggaaaaagcagcagggattcaggacgtcacgtatcagaccgatcagcaaaccttgatcctcaacaccgcgaccgcttatttcaacgtgttgaatgctattgacgttctttcctatacacaggcacaaaaagaagcgatctaccgtcaattagatcaaaccacccaacgttttaacgtgggcctggtagcgatcaccgacgtgcagaacgcccgcgcacagtacgataccgtgctggcgaacgaagtgaccgcacgtaataaccttgataacgcggtagagcagctgcgccagatcaccggtaactactatccggaactggctgcgctgaatgtcgaaaactttaaaaccgacaaaccacagccggttaacgcgctgctgaaagaagccgaaaaacgcaacctgtcgctgttacaggcacgcttgagccaggacctggcgcgcgagcaaattcgccaggcgcaggatggtcacttaccgactctggatttaacggcttctaccgggatttctgacacctcttatagcggttcgaaaacccgtggtgccgctggtacccagtatgacgatagcaatatgggccagaacaaagttggcctgagcttctcgctgccgatttatcagggcggaatggttaactcgcaggtgaaacaggcacagtacaactttgtcggtgccagcgagcaactggaaagtgcccatcgtagcgtcgtgcagaccgtgcgttcctccttcaacaacattaatgcatctatcagtagcattaacgcctacaaacaagccgtagtttccgctcaaagctcattagacgcgatggaagcgggctactcggtcggtacgcgtaccattgttgatgtgttggatgcgaccaccacgttgtacaacgccaagcaagagctggcgaatgcgcgttataactacctgattaatcagctgaatattaagtcagctctgggtacgttgaacgagcaggatctgctggcactgaacaatgcgctgagcaaaccggtttccactaatccggaaaacgttgcaccgcaaacgccggaacagaatgctattgctgatggttatgcgcctgatagcccggcaccagtcgttcagcaaacatccgcacgcactaccaccagtaacggtcataaccctttccgtaactgatgacgacgacggggcttcggccccgtctgaacgtaaggcaacgtaaagatacgggttatctgccgcattcttcccccttctcgcttcaatttcgaccagccatcctctattctgatgggtatttaccactggtcccggaagacaaaaatgaaacggacaaaatccatacgccacgcatcgttccgcaaaaactggagcgcacgccatctgacaccagtcgctctcgcggttgccactgtttttatgctggctggctgtgaaaagagtgatgaaacagtgtctctctatcaaaatgctgacgactgttcagctgcaaacccaggcaaaagcgccgaatgtaccaccgcgtacaacaatgcgctgaaagaagccgaacgtactgcgccgaaatacgccacccgtgaagactgtgttgctgaatttggtgaaggtcagtgccagcaggcaccagcccaggctggcatggcaccagaaaaccaggcgcaggcccagcaatccagcgggagtttctggatgccgctgatggccggttacatgatggggcgtctgatgggcggcggcgcgggatttgcacagcagccgctgttctcctcgaaaaacccagccagtccggcttacggtaaatataccgacgcgacgggtaaaaactatggcgcagcccagccaggccgcaccatgaccgtaccgaagacggcaatggcaccaaaaccggcgaccaccactaccgttacccgtggcggttttggtgaatctgttgccaaacaaagcactatgcagcgtagtgcaaccggtacctcttctcgttcaatgggtggctgataccgatggaaagagtcagtattaccgagcgcccggactggcgtgagaaagcccacgaatacggtttcaattttcacaccatgtacggcgagccgtactggtgtgaagatgcttactacaagttgaccctcgcccaggttgaaaagctggaagaagtcaccgccgaactgcaccagatgtgcctgaaagtggtggaaaaagtgatcgccagcgatgagctgatgaccaaattccgcattccaaaacacacctggagttttgtgcgccagtcatggctgacgcaccagccatcgctttattcgcgtcttgatctggcgtgggatggcactggtgaacctaaacttctggaaaataacgccgatacgccaacgtcactatacgaggcggcgttctttcagtggatctggctggaagatcagcttaacgccggtaacttgccggagggcagcgaccagtttaacagtctgcaagaaaaactgatcgatcgcttcgttgagctgcgtgaacagtatggcttccagttgctgcatctcacctgctgtcgcgacacggtggaagatcgcggaaccattcagtatttgcaggactgcgcaacggaagctgaaattgctactgagttcctctacatcgatgatatcgggttaggtgaaaaaggtcagttcacggatttacaggatcaggtaatttccaacctgttcaaactgtatccgtgggaatttatgttgcgtgagatgttctcaaccaagctggaggatgcaggcgtacgctggctggaaccggcgtggaagagcattatctccaacaaggcacttctaccgctactgtgggagatgttcccgaatcacccgaacctgctgcccgcttattttgcggaagatgatcatccgcaaatggaaaaatatgtggttaaaccgatcttctcccgtgaaggcgcaaacgtgtcgatcattgagaacggcaaaaccattgaagcagcggaaggtccgtatggcgaagaagggatgattgttcagcaattccacccgttaccgaaattcggcgacagctatatgctgattggtagctggctggtgaacgatcaacccgccggaattggcattcgtgaagaccgtgcattgatcacccaggatatgtctcggttttatccacatatttttgttgaataagccacgataccggatggcactcgccatccggtaattgttagcctatctgcaccgacagcatactcaggctgcccatttctataccctcaaccggaatggtaattggctcctgcccatcccacgcacctaacacatacaacaacggcaaataatgctctggcgttgggttcgataacgtgccaccttcatggtcgaggtaattcaccagaggatgttgttccactggcccttgccacgtcagattcgctttcacatactcattaaacgacgtcgcccacggatacggtgaactatcaccgtgccacttcactgtgcgcaggttatgcaccacgttaccgctggcgaccaacattattccttcatctcgcagcgctgccagtttgcgccccatttcgaaatgccaggcggcaggtttgctactgtcgatactcaactgcaccatcgggatatcagcgtcaggatacatcttaatcagcacgccccacgagccgtggtcaaagccccaggcttctttatccagcgtcaccgggatcggcgctaacagctcaaccagacgctgtgccagcgcaggcgaacccggagcaggataatgcgtatcgtacagcgcctgcgggaagccaccaaagtcatgaatcgtgggcggcgtctccatcgcggtcactcctgttccacgggtaaaccagtgagccgaaaccaccacaatcgcttgcgggcgtggcaatgtcatccccaacttctgccagctgcgggtatacaaattatcttccagcacgttcatcggactaccgtgacctaaaaacaatgctggcatacgtgttgaagacatgatgatatccttaactaaaggtgtcattttgatatcctcacaatacgcttgttcggcggagtaagaacccggataacaatgatgatgatcatcagttattttgacgatctgcctgaaggtgaagatttataaggagttgtcgatgtcagtacctctcattctgaccatactggcgggggcagccacgtttattggcgcgtttctcggcgttctcgggcaaaaaccctcgaaccgcttactggcgttttcgctaggttttgcggcggggatcatgttgctcatctcattaatggaaatgcttcctgccgcactagcagctgaaggaatgtcgcctgtgttgggttatggaatgtttatcttcggtctgcttggctattttggcctggaccgcatgttgccacatgctcatccgcaggatttaatgcaaaaatcggtgcagccgttgccaaaatcgatcaagcgcacagccattctgctcactctcggcatcagtctgcataacttcccggaagggattgccacctttgtcacggcgagcagcaacctggagctgggatttggcatcgcactggccgtcgcgttgcacaatatccctgaaggtctggcagtggcaggcccggtttatgcggcaacggggtctaaacgcaccgcgattctgtgggcggggatttctggactagcagaaattcttggtggtgtgctggcgtggttaatcctcggtagcatgatttccccggtggtcatggcggcaatcatggcggcggttgcaggaattatggtggcgctctcggttgatgaattaatgccgctcgccaaagagattgaccctaataataaccccagctatggcgtactatgtggaatgtcagtgatgggattcagtttagtgctgctacaaacggcgggaattggttaaaaacaacatcagaagttgtccagcgcatggacaacttctgccagcttcacgaaagccttattctaccttttcggctgtctcttctctcgtactgtttaagtatttgttccgcgcttcaagcagtgcgtctctgtcctggcgaaacgcccgacaataacgtttcaaatgcaggaaataacccaccacaaccagagcaatcaatacaatccagtaccaggcgataaacatccttttacccttaatatttaacaatactaaacatttagcgtataaatttcacatatcctttttcggatatattcatatggtcgcataataacggaacaattatatgattttgatcataatgaaaaagaatgcctgatattaatgaaattttctcatagaaagagaagcggaattaacatcttgcatagcagggaaaaataaaaaccgaagcctgctacaacttcggtttcttgattaaggcagtaaattaagcagcggttttcagctggctttacgctcatgtgcctgacggtatgccaccaggtcttcaatagtcacgagcgccatattgtgtttattggcaaactcaatacactctggtgcacgcgccatcgtgccatcgtcattagtcagctcacacagtacaccagccggtttaaagcctgccagcgtcatcagatcaatagttgcttcagtatgaccgccacgcgtcagtacaccacctgcctgagcgcgaagtgggaaaacgtggccaggacgattcagatctgacggttttgcgccatcggcaatcgctgcgcgaacggtcgtaatacggtcagcggcagaaacaccggtagtcacaccttcagctgcttcaatggtcacggtaaaaccggtgccataggcgctggtgttattttctaccatcattggcagatcgagttgtttacggcgatcttcagtaatgcacaggcaaacaataccgctaccgtggcgaatggtcagcgccatctgctcaacagtcatggtttctgccgggaagatcatatcaccttcgttttcacggtcttcatcatcaagcaccattacaccgcgtccttcacgcagcgcagccagtgcattttcaacacgttcgaaaggcgtaccaaaagaggaaagtagcgtctgattcatggtaaaaaaacctcactaaaattatggttaccagaatcagggcagtcttaggagtggcggcatatagccaaaataacgtgagcgggtccatgcccgacagaatcgttactctctcccatccggactctaaccgtcggccccggaattacaccggatctgctgtcctttgagttcgcacccaaagcgctcgcgggctttcaactgagttgatttaccgccggtggggaatttcgccccgccctgagaataagcggattcactataacgctaatgattagcggcagcaacgcatagcttcacataattctggtttatgacttacccttatcgcactacaatggcactcaacacctatcagtacagggaaactacaatgattgacccgaaaaaaattgagcaaatcgctcgccaggttcacgaatcaatgcctaaaggaatcagggagttcggggaagatgtggagaaaaaaatccgccaaaccctacaagcgcagctgacgcgcctcgaccttgtaagccgtgaagagttcgacgtccaaacgcaagtcctgttacggactcgtgaaaaactggcgctgcttgaacaaagaatcagcgaactggaaaatcgcagtactgagatcaaaaagcagccagatccagagactctccccccaacgctgtaaacattcgtctttaatgcactgtaaattatgaattaatcctctaatttatagtgctttctattaccttatcgcgtaatcccattcagaaaaccatcacaaaaatgaatgagtacaattgaaagtataattgcaatgtattttttaagttttacttaatcgatatttagataaactaattttataaaaaacacaaaataaaatatcatatttcaatgattagtagtccttaaataacagttactaatcattctcttttctacttatctttatataaaggaatattatgtccgcttttaaaaagtcacttcttgttgctggcgtagcaatgattctttccaataacgtgtttgctgatgaaggtcacggtattgttaaatttaaaggtgaagttatctctgctccatgttctattaaaccaggtgacgaagatttaactgtaaatctgggtgaagtagcagataccgtactgaaaagcgatcagaaatctttggctgaacctttcactattcacctgcaggactgcatgctgagtcagggtggaactacttattcaaaagcgaaggttactttcactacagcaaataccatgacgggtcagtctgatcttctgaaaaataccaaagaaactgaaatcggcggcgccactggcgttggcgtacgtattctggacagccagagcggcgaagtaactttaggtactccggtagtaattacgttcaacaataccaacagctatcaggaactgaatttcaaagctcgtatggaatccccaagcaaagatgccaccccgggcaacgtttacgctcaggctgactacaagattgcttacgagtaatcgcatttggccgggttcgcccggccacatcattaacggattaatgataagtggatcagatgtataaaaaattaaaattaaccacaataagcgaattgattaaaaatatttattgttcattatccgttattagactggccccctgaatctccagacaaccaatatcacttaaataagtgatagtcttaatactagtttttagactagtcattggagaacagatgattgatgtcttagggccggagaaacgcagacggcgtaccacacaggaaaagatcgcaattgttcagcagagctttgaaccggggatgacggtctccctcgttgcccggcaacatggtgtagcagccagccagttatttctctggcgtaagcaataccaggaaggaagtcttactgctgtcgccgccggagaacaggttgttcctgcctctgaacttgctgccgccatgaagcagattaaagaactccagcgcctgctcggcaagaaaacgatggaaaatgaactcctcaaagaagccgttgaatatggacgggcaaaaaagtggatagcgcacgcgcccttattgcccggggatggggagtaagcttagtcagccgttgtctccgggtgtcgcgtgcgcagttgcacgtcattctcagacgaaccgatgactggatggatggccgccgcagtcgtcacactgatgatacggatgtgcttctccgtatacaccatgttatcggagagctgccaacgtatggttatcgtcgggtatgggcgctgcttcgcagacaggcagaacttgatggtatgcctgcgatcaatgccaaacgtgtttaccggatcatgcgccagaatgcgctgttgcttgagcgaaaacctgctgtaccgccatcgaaacgggcacatacaggcagagtggccgtgaaagaaagcaatcagcgatggtgctctgacgggttcgagttctgctgtgataacggagagagactgcgtgtcacgttcgcgctggactgctgtgatcgtgaggcactgcactgggcggtcactaccggcggcttcaacagtgaaacagtacaggacgtcatgctgggagcggtggaacgccgcttcggcaacgatcttccgtcgtctccagtggagtggctgacggataatggttcatgctaccgggctaatgaaacacgccagttcgcccggatgttgggacttgaaccgaagaacacggcggtgcggagtccggagagtaacggaatagcagagagcttcgtgaaaacgataaagcgtgactacatcagtatcatgcccaaaccagacgggttaacggcagcaaagaaccttgcagaggcgttcgagcattataacgaatggcatccgcatagtgcgctgggttatcgctcgccacgggaatatctgcggcagcgggcttgtaatgggttaagtgataacagatgtctggaaatataggggcaaatccagttatcatcattggttgtgcgtcagcttatgccgttgaattcaacaaagatttaatcgaagccgaagatcgtgaaaacgttaacctttcccaatttgaaactgatggccaattacccgtcggcaaatattcactaagcactctgattaataataagaggacgccaatccaccttgacctccaatgggtattaattgataaccaaactgcagtttgcgtgacaccagagcaattaacattattaggatttactgatgaatttattgaaaaaactcagcaaaacctgatcgatggttgttaccctatcgaaaaagaaaaacaaattacaacttatctcgataaagggaaaatgcaattatccatatctgcacctcaggcatggttaaaatacaaagatgcaaactggacgcctcctgaactttggaatcatggtattgctggggcatttcttgactacaatttatatgcctctcattatgcaccacatcagggcgataattcgcaaaatataagttcctatgggcaggctggggttaatcttggggcctggcgcctgcgtactgattaccagtacgatcagtcatttaacaatggcaaaagccaggcgaccaacctggattttccgcgtatttatttgtttcgcccaatcccagcaatgaatgcaaaactaactataggtcaatacgatactgaatcctctattttcgactctttccatttttctggcatttcgttgaaaagcgatgagaatatgttaccgccagacctacgtggttacgcaccgcaaatcacgggtgtcgcacaaacgaatgcaaaggtcactgtctcacagaacaaccgtattatttatcaagaaaatgttcctccaggcccatttgctattaccaatttattcaatacattacaggggcaacttgacgtcaaggttgaagaagaggacggacgcgttacgcaatggcaagttgcatctaatagtattccttatctgacgcgtaaagggcagattcgctacaccactgctatgggtaaaccgaccagcgttggtggtgattccttacaacaacccttcttctggactggtgaattctcatggggttggctgaacaatgtatccctgtatggtggttcagttttaacaaaccgtgattatcaatctctggctgccggcgttggttttaatcttaactcattaggttcattatcttttgatgtcacacgatctgatgctcagttgcataatcaggataaagaaacgggttatagctaccgcgctaactattcaaaacgttttgaatctaccggtagccagctcactttcgctggttaccgtttctctgataaaaactttgtgacaatgaatgaatatatcaatgacactaaccattacacgaattatcagaatgaaaaagagagttatattgtcacgtttaaccagtatcttgaatcattaaggttaaatacatacgtaagtttggctcgtaatacttactgggacgccagcagtaatgtgaattattcattatcacttagccgcgattttgatatcgggccattaaaaaacgtctccacttctctaacatttagccgaataaactgggaagaagacaaccaggatcaactgtacctaaatatttcgattccctggggaactagtagaacattgagctatggtatgcaacgaaatcaggataatgagatttcgcatactgcttcgtggtatgactcttccgatcgaaataattcctggagcgtttctgcttcaggcgacaatgatgaattcaaagatatgaaagcgtcactacgcgccagttatcagcataataccgagaacggtcgactctacctctccggtacatcacagcgagacagttattattctctgaatgccagttggaatggttcattcactgcgactcgccacggtgccgctttccacgactatagcggtagtgctgactcgcgttttatgatcgacgcagacggcactgaagatattccgttgaacaataaacgcgcggtaactaatcggtatggcatcggagttattccatcagtcagcagttacataacaacatcattaagtgttgatacccgaaatctgccagaaaatgtggatatcgaaaactcggttatcaccaccaccttaaccgagggtgctattggctacgccaaacttgatacccgcaagggctaccaaatcataggggttattcgcctggcagatggtagtcatccaccactggggattagcgtaaaagatgaaaccagccacaaagaattaggactggttgctgatggcggctttgtatacctcaacggcattcaggatgataacaaacttgctttacgctggggtgacaaatcttgttttattcaaccacccaatagcagcaacttaaccaccggaacggctattttaccgtgtattagccaaaattaattcaggatgaaactaatgcgctacttaaatacaaagaatatcattgcagcaggagtattactctcctgtatgagcagcattgcctggggtgccatcatcccggatcgtacccgtatcataatgaatgagtcagataaaggcgaagcattaaaacttactaatcaaagtaaaaacctgccctatctggcccaaacatggatagaagatacgaaaggcaataaatcgcgtgactttattgtcactgttcctccaatggtgcgtttaaatcccagtgagcaaattcaaataagaatgataactcaggaaaaaattgctcaacttcctaaagacagagaaacgctcttctattttaacgtgcgagaaataccgcccaaaacagataaaaaaaatgtgatgcaagtcactatgcagcacgcattgaaactattctggcggccaaaagccattgaattagaagacgatggggtaatgacttacgaaaaagttgaaatcattcgtagaaatgacggttcgatccgctttaacaataagatgccttatcacgttacgctgggttatatcggaacaaatggggtaacgatgttaccacaaacgcaaagcttaatggtaaccccttttagctatgcaaatacgcagtttaaaaatgttccgtcaacttttcaggtgggttatatcaatgactttggtggattaagtttttatgaaataaactgccctgtagtaaataacatttgtaatatttctgtagccaaccgagatcaataatatgcgctacttgttaattgttattactttttttatgggttttagttcattacctgcatgggcaatggactgctatgctgaacatgaaggtggaaataccgttgtcattggttacgtaccaagaatctctatccccagcgatggtaaaaaaggtgataaaatctggcaaagcagtgaatattttatgaatgttttctgtaataatgcactaccaggcccatctccaggagaagaatacccatctgcatgggcaaatataatgatgttgttagcatcaggtcaagacttttataatcaaaactcttatactttcggtgtaacttataatggggttgattatgattctacatctccactacctattgcagcacctgtatgtattgatataaagggagccggaaccttcgggaatggctacaaaaagcccgcagtctgtagtggcggtcctgaaccgcaattatcagtaacttttccagtacgagtgcagctatatattaagctagctaaaaatgccaataaagtaaataaaaaacttgtattacctgacgaatatatagcacttgaatttaaaggtatgagcggagcaggtgctatagaagtagataaaaatctgaccttcaggattcgcggattaaataacattcatgtccttgactgctttgttaatgttgatctggaaccagctgatggcgttgtcgactttggtaaaataaattcccgaacaattaaaaataccagcgtgagtgagacgtttagcgtagtcatgaccaaagatccgggtgcggcctgtactgagcagtttaatattttagggagttttttcactacggatattttgagtgattatagccatctggatataggtaatggtctgctattgaagatatttcataacgatggaacagcaacggaatttaaccgcttctcacaatttgcttctttttcatcgtctagtgcgccttcggtcaccgcaccattcagggcagaactgagtgcgaacccggcagaaacggttgttgagggaccgtttagtaaagacgtaatcctgaaaatcacctataactagtatctaatacaaacactaaaacgggccatcaggcccgttatatcagtgctctaactccagctctcttgcctgcatcatctgttgacaataccaggcataacgtgcgcaaaaccaggttctatgttcttcatccatgttaccagtaacggccagaatatcgaccgggcgaccttctgcgtgcattctggcaaaactacgcgccaggaaatcgaaattatttaaagaattaagactatgatccataagcacatcctccggttatcgcataccttttaaggccatatgctttttctgatttcagtattccccaatcagtgtagtgcctttaaacataacgtgcgtaaatatattgtccccgatcacactttttagtgaaaaataaaaaaccatattaaaagactttctcttccagaacttctctaacctgtgttattattaacacagataaatgtaagcaaggaaactattacaaagtaaatattgcgtcactaaatggacattggagtgatatatgattttattcgccgactataacaccccttatcttttcgctatttcctttgtactgttgatcggcctgttagaaatttttgcgcttatctgcggtcacatgctctccggtgctcttgatgcacatcttgaccattatgattctataaccacaggtcatattagccaggcacttcattatctcaatattggaagattgccagctctcgtcgttctctgcttactggctggtttttttggtcttattggcatcctgttgcagcatgcctgcatcatggtctggcaatcaccactgtcgaacctgttcgtggttcctgtcagtttactgtttacgattattgcggtgcattataccggtaaaatagttgcgccctggattccacgcgaccatagttcagctattacagaagaagaatatattggtagcatggcgttaattaccggtcatcaagccacttcaggtaatccctgcgaaggaaaactcaccgatcaatttggccaaatacattatttactactggagcctgaagaaggaaaaattttcactaaaggagacaaagtgttaattatttgccgactttctgcaacgcgatatttggcggaaaataatccctggccccaaatattgtaatttattaatcaaaaggaaatttaataatggatgatattgttaattctgtgccctcctggatgtttaccgcaattattgccgtatgcattctgtttattattggaattattttcgccaggctctatcgtcgcgcttcggcagagcaagcttttgttcgtactggtttaggtgggcaaaaagtggtaatgagcggtggcgcaatcgtgatgccgatctttcatgaaataatccccatcaatatgaatactctgaagctggaagtcagccgctcaaccattgatagcctgattacgaaagatcgtatgcgcgtcgatgtagtagtcgctttctttgtgcgggtaaaaccttcagtagaagggattgccaccgctgcccagacgctggggcaacgcaccctgtcgcctgaagacttacgtatgttggttgaagataaatttgtcgatgccctccgtgcaacagctgcgcaaatgaccatgcatgagttacaggatacccgcgagaactttgtgcagggggtgcaaaatacagtggcagaagacctgtcgaaaaacggtctggaactggagagcgtttcacttaccaactttaaccagacctcgaaagaacatttcaatccgaacaatgcctttgacgccgaaggtttaaccaaactgactcaggaaacagagcgccgtcgccgcgaacgtaacgaagttgaacaggatgtagaagttgcggtgcgtgaaaaaaatcgcgatgcgctatcgcgcaagctggagattgaacagcaagaagcgtttatgacgcttgagcaggagcagcaggttaaaacccgtactgccgaacagaatgcacgtattgcggcttttgaagctgaacgtcgtcgtgaagcagagcagacacgaattctggctgaacgacagattcaggaaacagaaatcgaccgcgaacaggccgtccgctcaagaaaggttgaagctgaacgtgaagttcgcattaaagagatcgaacagcagcaggtcaccgaaatcgctaaccagacgaaatcgatcgctattgccgccaaatcggaacaacagtcccaggcagaagcgcgtgctaatctcgcacttgcagaagcggtaagcgcccaacaaaacgtagaaaccactcgccagactgccgaagccgatcgtgctaaacaagttgccctaatcgctgccgcgcaggatgcagaaaccaaagcggttgaactgaccgtgcgggcgaaagcagaaaaagaagccgcagagatgcaggcggcggctatcgttgagttagccgaagctacacgtaaaaagggtctggcggaagcagaagcacaacgtgcgctgaacgatgctatcaacgtactttctgatgaacaaaccagccttaaattcaaactggccttgttgcaggcgctgcctgcggtaatagagaaatccgttgagccgatgaagtcaatcgacggtatcaagattattcaggtcgatggtctgaatcgtggcggcgctgcgggtgatgcaaacacgggtaatgtggggggcggaaacctggcggaacaagcattatcagccgctctctcttaccgcacacaggcaccgctgattgactccttgctcaatgaaattggcgtttcaggcggctcactggcggcattgacttcacccttaacctcaacaactcccgtcgaagaaaaagcagagtaaaccctcttccaggaataatccctggcccaaaaagccggggattttttatatctgcgttccgctaaaaagtgcaaatgatcaggttgttgcagcattttgcgtgacggctcggggaaggcaaaactgcatcagagaaagcattgcgtggggtctggcgctcatcaacaatcggggagtcagcagggggctgaaacgggaaagcccctcccgaagaagggggccttacagaaggaaagggttatgatgaagctcgtcatcatactgattgtgttgttactcgtaagtttcgcagcttattaacagccaatcagaggggggagaaatcctccctcacccttgttcctttactttaggttgaaaaaaaatcagcgtcaagaaggtttcattaacacatatccctggcccaaaaagccggggattttttatatctgcgttccgctaaaaggtgcaaatgctcaggacgttgcagcgttttgcgtgaccgctcggggaaggcaaaattgcctctgggaaagcattgcgcggggtccggcgctcatcaacaatcggggggcagcaaggggctgaaacgggaaagcccctcccgaagaaggggccttgtataaggaaagggttatgatgaagctcgtcatcatactggttgtgttgttactgttaagtttcccgacttactaacaactcatcagaggggggagaaatcctcccttacccttgttcctttactctaggttgaaaaaacaacagcgtcaataggcctgccatgtacgaagcgagatctgtgaaccgctttccggttagccttttttatcctgttggatcttcttgatgatgttggtcgtcgagcaaccgtcttcaaagttgagcaccaacacttcgccaccgttggcccagacttctttactcccggcaatctcttctggtttatagtcgccgcctttcaccagcagatctggcaagatcccggcgatcaagcgctgcggcgtgtcctcttcaaacgacactacccagtcgaccgcttccagtgcgcccagcacaatcatacgctgttcgagtgggtttaccgggcgggaatcccctttcagccgtttggtggaggcatcgctgttgacggcaacaatcaagcggtcacccagcttgcgggcatttgccagataagagacgtgcccggcgtgcaggatgtcaaagacaccgttggtcatcaccactttttcaccacgtttacgcgctgccgctacggccagcttcagttcctcttcggtcatcacgccaaagcctgtatctgcacgtccacgtacagcattttccagctcgatcggcgaaaccgtggaggttcccagtttgccgaccaccacgccagccgccgcattggcaaagaagcaggcttcttccagcgaattacccgctgccagcgttgccgccaggacgccaatcaccgtgtcgcccgcaccggtaacgtcatacacttcctgcgcttgggttggcatatgcagcggcgctttacccggttgcagcagcgacataccctgttcggaacgggtcactaacagagccgagagttcgtaatcggcaatcagtttcatgccgcgctcaacaatctcttcttcggtcttacatttaccgacaacagcttcaaattccgagagattcggcgttaacagcgtagcgccgcggtagcgctcaaaatcggtaccttttggatcaatcagcaccggaacacccgctttacgcgccagttggatcatctgctgtacgcttgccagcgcacctttggcgtagtcagaaagcaccagcgcgccaatcgaactcagcgcctgattaatccgctcgtgcagcggctgcggatcaacaccttcgaaaccttcttcaaaatccagacggatcagctgttggttgcgggaaagtacccgtaatttggtaatggtcggatgcgtcggtacagaaacgaagtcgcatttgacgttgacgtcggccagagatttactcagcgcgcgcgctgcatcgtcaatgcccgtcaacccgaccaggcgtgcattagcaccgagagaagcgatattcatcgccacgttagccgcgccgcccggacgttcttcgatggtattcactttaaccacgggcaccggcgcttccggcgagatacgactggtggggccgtaccagtaacgatccagcatcacatcaccaaccaccatcactcctgcacgttcaaactctggcagcgttactttcattcctgtctcctgagagattcaaaatttgcgcgcgataataccatacttcattcttccaccagccacttctgccagcttgcccgcaccagttcacgctctgcggtgaagcaatcctccgacacatggcccggcaattcctgtaatgccagatgatgaagttcatcgcgaagcgtagtgtaagcacgggtcagcgccatcgcttcctgctcttccataatgtcgttttgcgccagtagttccagaatacgcacgttgtctgaccagcgcgttaacttcggtttttcatgagcgtagcgcaacaccagatattgggtaataaattcgatatcggtaattcccccttcatcagctttgatatcaaagcgatcgcgatgtttattgccgagatgagcgcgcattttctcgcgcatttcccgcacttccgtttgcagagttttaccttcacgcggcagcgtcataatctcgcgacgcactgcgtcaaagtgcgcggtgagctgcggatcgccgtacactacacgcgcacgcaccagcgcctgatgttcccacgtccaggcctcgtttttctgataatcggcaaatgcttctgcggatgtcaccagcattcccgccgccccggacggacgcagtcgagcatccacttcatacaaaatgccggaagaggtacgcgtactgaacagatgcataatgcgttgcgccagacgcagataaaactgccgcccgtcgatttcccgctcaccgtcagtcatcgcatccattgggcaatcatggaggaagataaggtcaagatcggaactgtagcctaactcccagccgcccagcttgccgtagccgaccaccgcaaaaccacgcccttcgcgttcgttcaggtgattcggcttaccgtagcgggcaaccatttgaacccacgcctgctgaacgacggcatctatcatggcttccgccagccaggttaagtgatcgctcactttcatcaccggtagcgtaccggcgatatccgctgcggcgatgcgtaacagctgcgcctgtttgaactgacgcagcgcctcaagctgttgctcttcgtcatcttccggcacgcgcagcaaatactggcgcaactcatcgcggtaggcatcggtcgccgtcggctggtaaagggtgtttggatcgagcaattcatccagcaataatggataacgcgccagctggctggcaatcatcggcgacgcggcacacagagaaatcaaatgtttaagcgccgcggggaattcactgagcaattctaaataggtggtgcgggtaacaatccccaccagcaaggcggtaatgcgcgacagcgtaacggcagcgtcttcacgcgcacagacatcacttagcagatgcggcatcagatggtcgagcacctgacgtcctcgcggcccgatggtgcgcttatccagctctttgcggaaatcggcaatcagcgttagcacctgtttgcgatcatcctcgctaagatgcgccagcactggcgtagtgtcatcttcctgcaacgcatcctgccacagctcacgccactgttccgacagcgactcttcctgagtttcactttcatcgtcgccaatcaattcattaaacacccggcgcacattggtcatatgtgcggtcagcgccccggtcagttgcggccagtcagcaaagtccatcgcccacgccagccgcgcacgattaagctcatcagaaggaagcgtctgggtttgttcgtcgttaatgctttgcagcaggttttccagacgccgcaggaacagatacgccactcgcaattgttcagcatcgttttcagaaagcagatgcagctcggcaatggcgctgagcgttggcagtaaagagcgcgattgcagcgacggttcgcgtccgccgcgaatgagctggaacacctgaacgataaattcaatttcgcgaatgccgcctgcgccgagtttgatattgtcggtcaaaccacgtcgacgcacttcacgggcaatcatccctttcatgttgcgcagcgactgaatcacgctgaaatcgatgtaacgacggaaaacaaacgggcgcagcatcgcacgcaactcgttagcatagacgccttcgctatcgcccataatccgcgccttgaccatcgcgtaacgctcccagtcgcgcccctgctcctggtaataatcttccaacgcggcaaagctcagcaccagcgggccactttcgccaaacggacgcagccgcatatccacgcgatagacgaagccatcctgcgttggttgatccagcactttaatcagccgctgccccatgcgggtaaaaaactgcgcgttatccagttcccggcgtccaccctgcgtacaaccatgttccggccaggcaaaaatcagatcgatatcagaggagaaattcagctccccaccgcccagcttacccatgcctaaaatcagcagcggttgcgcttcgccctgcgcattgcacggcgttccccactcgcggcagcaggcgtcatacagccagtcacgcgccgcaacaatcagcgtctccgccagatagctgagctgctgcaatatgctctcttcagtaaccagtgccagcgtttgcgcccaggcgatgcgcaccataatgcgccgccggaatagccgcagctcgcgcattaacccggcttcgtcactcacattacagagcgcctcctgcaaccatgccgcgtaatgctgccattcgtcggcctgcggcggttggctttccagttccgtcagccactctggatgcgcaatcacgctgtcctgcacaaaatcactaaaagtaagtactgacttcgcctgtgcgctaagtgattcctcggctaaaggctctggcagccgctcaacaacggtctgccagtactgctgtaacggtgaagagagcggcttcataagcgattttatccttgcctgattaacgttttccgctgtgcaaccagaacggttcctgattgtttgcctcattacggaaatgttcaatttcgatgcgttgcccggtcgcaatagcgtgatgcagcccctgccagttctccagccaggcttgcgcgacgacaggatcatagtaacccgccagcaacagtattgagtcaatatcacgcgtcaggcgtggcaactggtcacggtagcgatcgcctaacggctggcagaaaacgcttttcagttcagcggcatggcgggaaagatggatatcggcaaagcgtttgaaggagtcgctgattttgccctgcgctttggcatctaaaaatggctgccatgctttgcttaccaaccattcggtcaacgccagcttcgccattgccgtttcggtagagtagaccgccgtcacggcagacaccgcagaagcaatggtcgcctcgcattgagtcagcagatcacgtaagtgagtgctcgctttacgcggcacaataccaccgaacagcatcagcgtatgacggaccaggctaatggctgccagcacctgttctttcgccgcatcgttgccgcgtacccacagttcttcatgatactgccattgcgctaacgccagctcgagcgccgcttccagcccctgttccacatcggcttttgccgcaacatgcaaaatggtggtcggtttgatttcacgcgccggattgccctgcgccagatgatagccacgcgccgctttgctcaggctgccctggcgtaatccggtttgcgataccagttggttcgccagtttcagcaccgcgcgcgtgtcgccgctaagcagttccagttccagctcacagataggttcagcaaattcacccgctttcacttccccctggtcgagggcgatttcaatttggctaccatcgaccgccaccagccatttttcgcgataaaaatcggtgctgaacagcggctgcacgcgggaggcgagatcggcgggcaattcgccgttcggccagacttccgtcggtaactgcgccaggtcgagcgtcggttcgctcaacgccacgttatattccgggcgctgatgtaagccgcctgtcactcttcctgcaactttcatggtcatctcatagcgaccgttttcgccacgaatacgtaagcccatatcgtgcccacgcagccagttatccggcgtttcgtagtaaatattcagcaactgcacggggtcatggtgctcgccgcccagcgtattgagatggtcacgcaacgcctcaacggcactgtgattaacaataaactttaattcgatttcctgagccatggcctttacttatcggttatgtcacataagtgacgatgaacggcgaacttaatgcgatcttttttgtcagtagatagtattttgcgccaaattgccatgcaacgggcaatttgacgggcgtaaaagtttgaagcagtggcaagacctgacacagaggattccgattgatgtcgaatgctttgcgtagcgacactgatgccactactatcgttccactttccatgacaataacgacagcctgatgccaaaattacgcctgatcggattaactttactcgcacttagcgcgactgccgtctcacacgctgaagaaacgcgctatgtttccgacgaactgaatacctgggtccgcagcggtccgggagatcattatcgcctcgtgggcacggttaacgccggcgaggaagtgaccttattacaaactgacgccaacaccaattatgcccaggtgaaagacagctctggccgtaccgcctggatcccgttgaaacaacttagcactgagccaagcctgcgctcccgtgtgccagatctggaaaatcaggtcaaaaccctgaccgataaactcaccaatatcgataacacctggaatcagcgcaccgcagaaatgcagcaaaaagtggcgcagagcgacagcgtgatcaacgggttaaaagaagaaaatcagaaactgaaaaacgagctgattgtcgcgcagaaaaaggtcgatgccgccagcgtacagctggatgacaaacagcgcaccatcatcatgcaatggtttatgtatggcggtggcgtgctggggcttggcttgctgctcggtctggtactgccgcacctgatcccaagccgcaaacgcaaagatcgctggatgaactaaatcgccttcttcgttgcactgtcttattattaggaattgtgtatttgacgaagggatgatggcgtgaagatttatctggtcggtggtgctgttcgggatgcattgttagggctaccggtcaaagacagagattgggtggtggtcggcagtacgccacaggagatgctcgacgcgggctaccagcaggtaggccgcgattttcctgtgtttctgcatccgcaaacgcatgaagagtatgcgctggcacgtaccgaacggaaatccggttccggttacaccggttttacttgctatgccgcaccggatgtcacgctggaagatgatcttaagcgtcgcgatctgaccattaatgcgctggcccaggacgataacggcgagattatcgacccgtacaacggtctgggcgatctgcaaaatcgtctgttgcgccatgtttcccccgcttttggcgaagatccgttacgcgtattgcgcgtggcgcgttttgctgcgcgttatgcccacctcggttttcgtattgccgatgaaactctggcgttgatgcgcgagatgacccatgcgggtgaactggaacacctgacgcctgaacgggtatggaaagagacggaaagcgccctcaccacccgcaatccacaggtgttcttccaggtactgcgcgattgcggcgcactgcgcgttttattcccggaaattgacgcactgtttggcgttccggcccctgccaagtggcatccggaaatcgatacgggtattcataccttaatgacgctctcaatggcggcgatgctgagtccgcaggtcgatgtccgtttcgcaactttatgccacgatctcggtaaagggctgacgccgccagaactctggccgcgtcatcatggtcatggcccggcgggtgttaagttagtggaacaactatgccagcgtctgcgcgtgccaaatgaaattcgcgatttagccagactggtggctgagtttcacgatctcatccacaccttcccaatgctgaacccaaaaaccatcgtcaaattatttgattccatcgatgcctggcgtaaaccgcagcgtgtcgagcaactggcgctgaccagcgaggctgacgtgcgcggcagaaccggttttgaatcagcggactacccgcaaggccgctggttgcgcgaagcctgggaagtggcgcagtcagtgccgacaaaagccgtcgttgaagcgggatttaaaggtgtggagattcgcgaggagctgacccgacggcggattgcggcggtagccagctggaaggaacaacgttgcccaaagcctgaatgagtattgggcattttgccggatgcggcgtaaacgccttatccggctacatgtcaacgacagttgtaggcctgataagacgcgcaagcgtcgcatcaggcgttgattgccggatgcggcgtgaacgccttattcggcctacgcaatcgttgacaacgccaagcatccgacactattcctcaattaaaagaacacgacatacaccgcagccgccacaataaagcgataaatggcgaacgggataaacgaaatgcgcttaatcaattgcaggaaggttttaatcgctatcagcgccaccacaaaagcggtgataaacccaacggcaaacatcgggatatcgccgcttgtcaggaagccccagcttttgtagagatcgagcgccgttgcgcccatcatcatcggcaccgccagcaggaacgaaaactcggaagcagcgtaacggctcacccccatcagcatcccacctgaaatggtcgccccggaacgggagaaacccggccacagcgccagacactggaaacagccaatcataaatgcctgacgataggtcatatcatcaagacccggcgcacgcggctctttcggcttcaggcattcggcggcaatcagcaacaaaccgccaacgaccagcgcatacatcacatttatcgggttaaacaatgacttaatcgtgtcgtggaacaacagccccaataccaccgccggaatcatccccagcaaaatgtggatcagcgttaaacgacctttgctttcaccttcgtgctgcaacgggcggccaaagtggatgccaatcaggccaaacagacgccgccagaacatcactactaccgccagaattgatcctaactggatcacaacttcaaaggttttcgccgtgtcgccctcaaaccccaacaagtgaccgacaataatcatatggcccgtgctggataccggcagaaattctgtcaatccttcgaccacacccaatattgccgctatcagcagcgagtgcatatcgctcatcaataaacccctaaattattaaaatgtaccgcttgtccgaactactgcgtatgaccaggttataaccgtttggtttaacagctgtaaaattaattattttctttcagattattgccacgctcaatgattacgccaacattcgccgcccgcgccactgcgcctggcttgctgagtttgatacgcacccacggcgagttgaagcgtgctaacagcagctccgccacctcttcagccacgcgttccaccagcgcaaaacgcgccccctcgacgtggctgaccaccgtttctgcaatgtcagcgtaactgaggcaatccgccacatcatcacttttcgccgctttacggttatcccacgccatttcgatatcgaacactaacttctgttcgatggtctgttcccagtcgtaaacaccaatagtggtgattaccgaaagttgctctataaatacaatatccatcacgtcctgcctgctttttggctaaccggataccacttccggcgaaatgtgcgtattatccacagattcatcgttgaacacgaattttcaaaacggaacagcttatgagtgcaatcgcgcctggaatgatcctcatcgcgtacctctgcggctccatttccagtgccattctggtttgccgcttgtgtgggctgcccgatccgcgaaccagcggctccggcaatccaggcgcaaccaatgtgttacgtatcggtggcaagggagcagccgtagcagtactgattttcgacgttctgaaaggaatgttgcccgtctggggcgcgtatgaattaggtgtcagccccttctggctaggcttaattgccatcgccgcctgtcttggacacatctggcccgttttcttcggatttaaaggaggaaaaggcgttgctaccgcttttggtgccatcgcacccattggctgggatctcaccggagtaatggcgggaacctggttactgaccgtgctattgagcggatactcgtcgctgggagcgattgtcagtgcactgattgctccgttttatgtctggtggtttaagccacaattcaccttcccggtttcgatgctctcttgcctgatcctgctgcgtcatcatgacaacatccaacgtctgtggcgtcgtcaggagacaaaaatctggacgaaattcaaaagaaagcgcgaaaaggatcccgagtgatttctggtggatctacatgacctgatagccttcatcgggcttgcccagccgttgctggcaccatgccgccagaaattccacgcagacacgtaatttcatgctgcgatagagcggctcccggtaaacagcccagatattggcgctttgtgcatactctggcaatacttgcaccagtttgccactctccagaaacggcaacacatcccactcggaacgcagcataatccctttgccctccagcgcccattgcagcacaatctcgccgctattggaggaaagatgcccgcttaccttcaccgattttttctcctgaccgttccccaactcccatattccatgggtcatatcgcgctctttggtcaccagacagtcatgacgacttaattcctgtagggattgtggctgcggatatttttgcagatactcaggtgctgcgcataatattcttttattttttgtcaaaagatgcgcaatataataatcaggaatttcgtcattaatacgaatatccagatcaatattatcctgcactaaatcaatttgccgatcgaacaattcaaaatgcacctgtaactcaggataattgcgcatcagttcggtaatagctggcgcaatatggctgcgcccaaaaccaaaactgcaaccaatacgaatcatcccctccgggcgcgttttgatttgcgtgacgtcatcgaccagtcgctgatattgggtgaggatttccaacgcatgttcgtaacaacgttggccactttcagtcagcgccacgccgcgagcggagcggttcagcagcgttgttgccagcgtattttcaaggatttggatccgcttggtgacaaatgcaggcgtctgcccaagcgtcgccgctgcggcgctaaaactcccgctgtgaacgatttctaccagtacctgcaagtctttggctaaaggccagctattcagcatcgttaattatccgcagttgtgataagcgcagtgtatttcgcaaaacattgccattccctgctctggcgcaatattcattcttattttcgcgttgattcacgaactgttaattacatattcacggtggcaaaaaatataaaaccacatttttagtggtagtttgtggcggtgaatttttccagacaaatacaaaaactggagttgccatgatgagcgaaagtaataagcaacaggcagtgaataagttgacagagattgtcgctaactttaccgccatgatttctacccgaatgcctgatgacgtggtggataaactaaaacagctaaaggatgccgaaacgtcgtcgatggggaaaattatctaccatacgatgttcgacaacatgcaaaaagcgattgacctgaatcgtcctgcctgtcaggacaccggggagattatgttcttcgttaaagtcggttcccgcttcccactgcttggcgagctgcaaagcatactcaaacaagccgtggaagaggcaaccgtcaaagcgccactacgtcacaatgcggtagaaatttttgacgaagtaaacaccggcaaaaataccggtagcggcgtaccgtgggtcacctgggacatcatccccgacaatgacgatgcggaaatcgaagtttacatggcaggcggcggctgcacgctacctggccgctcgaaagtgttaatgccgtcagaaggctacgaaggcgtggtgaaattcgtcttcgaaaatatctccaccctcgccgtaaacgcctgtccaccggtactggtgggcgtgggcatcgccacctcggtggaaaccgccgccgtactctcgcgtaaagccattttgcgcccgattggcagccgccatcccaatccaaaagcggcagaactggagctacgcctggaagaaggactcaaccgtctggggattggtccacaagggctgaccggcaacagttcagtgatgggcgtacatatcgaatctgccgcccgccatccgtcaaccatcggcgttgctgtctctaccggctgctgggcgcatcgtcgcggcacgctgctggttcatgccgatctcacctttgaaaatctgtctcacacccggagcgcgttatgaaaaagatcctgacaaccccgatcaaagctgaagatctgcaagatattcgcgtcggcgatgtgatctacctgaccggtacgctggtgacctgccgcgacgtttgtcaccgccgtttgatcgaactgaaacgtccgatcccttacgatctcaacggcaaagcgattttccacgctggccccatcgtgcgcaaaaacggcgacaaatgggagatggtctccgtcggcccgacaaccagtatgcgtatggaaagttttgaacgtgaatttattgagcagaccggcgtgaaactggtggttggcaaaggtggtatggggccgctgaccgaagaaggctgccagaaattcaaggcgctacatgtgattttcccggcaggctgcgcggtgctggcggcaacccaggtggaagagattgaagaagtgcactggacagagctcggaatgccggagtcactgtgggtctgccgggtcaaagagttcggcccgctgattgtctctattgatacccacggcaacaacctgatagccgaaaacaaaaagctgttcgccgaacgccgcgatcccatcgtggaagagatctgcgagcacgtccattacatcaaataaccctcccggagaggctcacccctctcctttttcgcaggcataacacgatgaaaccttccactgaatggtggcgatatcttgcgccgctggcggtcatcgccattattgctctacttccggttcccgcagggctggagaaccatacctggctctactttgccgtttttactggcgtgatcgttggactgatcctcgaacccgtgccgggtgccgtggtggcgatggtgggtatatccatcatcgccatactctctccctggctgctgttcagcccggagcagctcgctcagccaggctttaaattcactgcaaaatccctctcgtgggccgtttccggtttttctaattcggttatctggctgattttcgccgcctttatgtttggcacaggctatgaaaaaaccgggcttggacgccgcattgcgctgattctggtgaaaaagatgggacatcgcacgctgtttctcggctatgcggtgatgttctccgagctgatcctcgcacctgtaacaccgtccaactcggcgcgtggtgcggggattatctatcccatcatccgtaacctgccaccgctctatcaatcacaaccaaacgacagcagttcgcgcagcattggctcgtacatcatgtggatggggattgttgccgactgcgtgaccagcgccattttcttgacggcgatggcaccaaacttgctgttaattggactgatgaaaagcgcatctcacgccacgctgagttggggcgactggttcctcgggatgttgccgctcagcattttactggttctgctggttccctggctggcttacgtgctgtacccgccggtactgaagtctggcgatcaggtgccgcgctgggcagagacggaactgcaggcaatgggcccgctctgttcgcgtgaaaaacggatgctggggctgatggtaggcgcgctggtgctgtggattttcggcggtgattatatcgatgccgcgatggtcggttacagcgtggtggcactgatgctgcttctgcgcattatcagttgggacgacattgtcagtaataaagcggcgtggaacgttttcttctggctggcctcgcttatcaccctcgccaccggactcaacaacaccggttttattagctggtttggcaaactgttagcaggcagcttaagcggttattcgccaacgatggtgatggtggcgttgattgtggtgttttatctactgcgctactttttcgccagcgccacggcgtatacctccgctctcgcaccgatgatgattgctgctgcgctggcgatgccggaaatcccgctgccggtgttctgcctgatggttggtgcggcaattggtctggggagcattcttacaccatacgccaccggccccagtccgatttactacggcagtggttatctgccaacggcggattactggcgactgggggcgatttttgggctgatattcctcgtattgctggtgattaccggcttactgtggatgcccgtggtgttgctttaagtgaggacggtgccggaaattgctctccggcacccaatagttttacgcagccggtaactccgccagcggccagcgcggacgcacgctaacgccgagatccgccgtcgcgcctgctttaaaccgcaccattccggcataggcgatcatcgcgccgttatcagtacaaaattccggacgcgcgtagaacacttcgccgcggcgttttttcatcatttcagccagcttcgcccgtaacgtacggttagcactcacgccgcccgccatgaccagtcgcttaaagcccgtctgatccagcgcccgcttgcacttaatcatcagcgtatcgaccaccgcatcttcaaaggcgcgggcgatatcagcacgcgtctggtcgtcggtgccgttgtcacgaatggtatttgccgcgaaggttttcaggccggagaagctgaaatccagccccggacggtcggtcatcggacgcgggaagacaaagcgcccggcagtaccctgagccgccattttcgacagtaacggcccgccaggataatccagccccagcagcttcgcggttttatcaaacgcttccccggcggcatcatcgatagactcgccgagcagctcgtactgaccaatgccagtcacgctgattaactgcgtatgaccgccggaaacaagcagcgcaacaaacggaaattccggcgggttatcttccagcatcggcgctaacagatgcccttccatatggtgtacagggatcgccggaacgtcccaggcaaacgccagagaacgccccacggtcgcgccaaccagtagcgcgccgactaatccagggcctgcggtataggccacagcatcaatgtcttttgccgttaaaccagactcctttagcgccgcctggatcaacggtacggttttacgcacatgatcgcgggaggccagttcaggcacgacgccgccgtagtcagcgtgcaatttcacctgactatacaattggttggctaacaaacctttttcatcgtcgtaaatggcgatgccggtttcatcgcaggaagtttcaatacccagtacacgcatgacttgttttacctcgctttattaccgcgcagtgtaggaccaatgcgggttgatgtaaaactttgttcgcccctggagaaagcctcgtgtatactcctcacccttataaaagtccctttcaaaaaaggccgcggtgctttacaaagcagcagcaattgcagtaaaattccgcaccattttgaaataagctggcgttgatgccagcggcaaaccgaattaatcaaaggtgagaggcacatgccggtaattaaagtacgtgaaaacgagccgttcgacgtagctctgcgtcgcttcaagcgttcctgcgaaaaagcaggtgttctggcggaagttcgtcgtcgtgagttctatgaaaaaccgactaccgaacgtaagcgcgctaaagcttctgcagtgaaacgtcacgcgaagaaactggctcgcgaaaacgcacgccgcactcgtctgtactaattccccgagagcgttgctctccgatcagaccgagttgtagttgtaaggccgtgcttccgaaaggaatgcgcggcttattttcgtttatgaattgctaaaaatcggggcctatggctggacgaatcccacgcgtattcattaatgatctgctggcacgcactgacatcgtcgatctgatcgatgcccgtgtgaagctgaaaaagcagggcaagaatttccacgcgtgttgtccattccacaacgagaaaaccccgtccttcaccgttaacggtgagaaacagttttaccactgctttggatgtggcgcgcacggcaacgcgatcgacttcctgatgaactacgacaagctcgagttcgtcgaaacggtcgaagagctggcagcaatgcacaatcttgaagtgccatttgaagcaggcagcggccccagccagatcgagcgccatcagaggcaaacgctttatcagttgatggacggtctgaatacgttttaccaacaatctttacaacaacctgttgccacgtctgcgcgccagtatctggaaaaacgcggattaagccacgaggttatcgctcgctttgcgattggttttgcgccccccggctgggacaacgtcctgaagcggtttggcggcaatccagaaaatcgccagtcattgattgatgcggggatgttggtcactaacgatcagggacgcagttacgatcgtttccgcgagcgggtgatgttccccattcgcgataaacgcggtcgggtgattggttttggcgggcgcgtgctgggcaacgatacccccaaatacctgaactcgccggaaacagacattttccataaaggccgccagctttacggtctttatgaagcgcagcaggataacgctgaacccaatcgtctgcttgtggtcgaaggctatatggacgtggtggcgctggcgcaatacggcattaattacgccgttgcgtcgttaggtacgtcaaccaccgccgatcacatacaactgttgttccgcgcgaccaacaatgtcatttgctgttatgacggcgaccgtgcaggccgcgatgccgcctggcgagcgctggaaacggcgctgccttacatgacagacggccgtcagctacgctttatgtttttgcctgatggcgaagaccctgacacgctagtacgaaaagaaggtaaagaagcgtttgaagcgcggatggagcaggcgatgccactctccgcatttctgtttaacagtctgatgccgcaagttgatctgagtacccctgacgggcgcgcacgtttgagtacgctggcactaccattgatatcgcaagtgccgggcgaaacgctgcgaatatatcttcgtcaggaattaggcaacaaattaggcatacttgatgacagccagcttgaacgattaatgccaaaagcggcagagagcggcgtttctcgccctgttccgcagctaaaacgcacgaccatgcgtatacttatagggttgctggtgcaaaatccagaattagcgacgttggtcccgccgcttgagaatctggatgaaaataagctccctggacttggcttattcagagaactggtcaacacttgtctctcccagccaggtctgaccaccgggcaacttttagagcactatcgtggtacaaataatgctgccacccttgaaaaactgtcgatgtgggacgatatagcagataagaatattgctgagcaaaccttcaccgactcactcaaccatatgtttgattcgctgcttgaactgcgccaggaagagttaatcgctcgtgagcgcacgcatggtttaagcaacgaagaacgcctggagctctggacattaaaccaggagctggcgaaaaagtgatttaacggcttaagtgccgaagagcgatcgggaagcccccgacagccgcactgagaggcagcggcaaatatataagtacgccctcgtaattatcgttggcggtaaacaaccgttggatttcagcgttaacggctgaaggacatcgggtcaatcgcccaacaccaacctcatgaaataagtgtggataccgtcttatggagcaaaacccgcagtcacagctgaaacttcttgtcacccgtggtaaggagcaaggctatctgacctatgccgaggtcaatgaccatctgccggaagatatcgtcgattcagatcagatcgaagacatcatccaaatgatcaacgacatgggcattcaggtgatggaagaagcaccggatgccgatgatctgatgctggctgaaaacaccgcggacgaagatgctgccgaagccgccgcgcaggtgctttccagcgtggaatctgaaatcgggcgcacgactgacccggtacgcatgtacatgcgtgaaatgggcaccgttgaactgttgacccgcgaaggcgaaattgacatcgctaagcgtattgaagacgggatcaaccaggttcaatgctccgttgctgaatatccggaagcgatcacctatctgctggaacagtacgatcgtgttgaagcagaagaagcgcgtctgtccgatctgatcaccggctttgttgacccgaacgcagaagaagatctggcacctaccgccactcacgtcggttctgagctttcccaggaagatctggacgatgacgaagatgaagacgaagaagatggcgatgacgacagcgccgatgatgacaacagcatcgacccggaactggctcgcgaaaaatttgcggaactacgcgctcagtacgttgtaacgcgtgacaccatcaaagcgaaaggtcgcagtcacgctaccgctcaggaagagatcctgaaactgtctgaagtattcaaacagttccgcctggtgccgaagcagtttgactacctggtcaacagcatgcgcgtcatgatggaccgcgttcgtacgcaagaacgtctgatcatgaagctctgcgttgagcagtgcaaaatgccgaagaaaaacttcattaccctgtttaccggcaacgaaaccagcgatacctggttcaacgcggcaattgcgatgaacaagccgtggtcggaaaaactgcacgatgtctctgaagaagtgcatcgcgccctgcaaaaactgcagcagattgaagaagaaaccggcctgaccatcgagcaggttaaagatatcaaccgtcgtatgtccatcggtgaagcgaaagcccgccgtgcgaagaaagagatggttgaagcgaacttacgtctggttatttctatcgctaagaaatacaccaaccgtggcttgcagttccttgacctgattcaggaaggcaacatcggtctgatgaaagcggttgataaattcgaataccgccgtggttacaagttctccacctacgcaacctggtggatccgtcaggcgatcacccgctctatcgcggatcaggcgcgcaccatccgtattccggtgcatatgattgagaccatcaacaagctcaaccgtatttctcgccagatgctgcaagagatgggccgtgaaccgacgccggaagaactggctgaacgtatgctgatgccggaagacaagatccgcaaagtgctgaagatcgccaaagagccaatctccatggaaacgccgatcggtgatgatgaagattcgcatctgggggatttcatcgaggataccaccctcgagctgccgctggattctgcgaccaccgaaagcctgcgtgcggcaacgcacgacgtgctggctggcctgaccgcgcgtgaagcaaaagttctgcgtatgcgtttcggtatcgatatgaacaccgactacacgctggaagaagtgggtaaacagttcgacgttacccgcgaacgtatccgtcagatcgaagcgaaggcgctgcgcaaactgcgtcacccgagccgttctgaagtgctgcgtagcttcctggacgattaatcggtaggccggatcaggcgttacgccgcacccggcactaggccctctgcacaaacgccaccttttcggtggcgttttttatcgcccacgcactaccagcgcctggtccagctcgcgatacgcttcaaccagtttctccagtgaaacgcgacttaaaccgctgggatttggcagcacccaaatctgcgtcgaaccaatggtgagcgtttgtttcccccactgtgcaccgcgctggctgaatccctgttcatatgcttgtttgcccagaatcgccaacgcctgcggctgataatcttcaattttttcaatcagcttacgcccgcctgcgtgtagctcctgctttgaaacttcattggcttgcaccgttggacggtctaccagtttggtgacgccacaacgataatccagcagatgctgtgcctcctgcggcttcaactgacggtcggtaaacccggcctgatatatcaccttccagaagcgatttgccggatgagcaaagggaaaaccagtcccggcggatgaaagcccagggttgataccgcaaaacacgacccgtaaccctggagccaaaatatcctcaaccatatttactcctttctaacatcaccaggaaaagtataacggattgaaaatacattgtttataaaaacagcaggcgcgcggtaatggctggattgcgacacggagttactttataatccgctaccatggccccttagctcagtggttagagcaggcgactcataatcgcttggtcgctggttcaagtccagcaggggccaccagatatagcaaaggctgacgagaaatcgtcagcctttttctttttatatatcagttactttgcgtgccagtaagccgctgcacgtacccgctgtgggtcatactgttccgcttcaaagcggcggcttaaattcttaacgactttaccttcgccggttatccagatgaagtaatcatcggcagggatttgcatctgcgccagacgcgcatctaccgcctgctcatcatgtgccagccattcgatattaaaaccatcaaggtgcgcgagataatcctgacaggcgttatcccgcacgctaaccagcgcactaacttgcggtttaacggcaagtttgctcaacgtttccaggcggcggcgcaatgcaggcattccggattcatcgcagacatacagctgatacgcgtaatcttccggcaccaccagcgaaccgcgcggacctgccaccgtaagtttatcgcccggttgcgcctgcatcgcccagccgctggcgaccccaccgtcgtgaataaagaaatcaatcgccagttcatggcgtagttcgtcatacagcggcgtatagtcacgcgacggtgggcgtggtccttccggccagacgatgccctcttccgttaccgttggcggcacaaagtgagcgtcaggttgaggaaagaagagtttgctgtgatcgtcaaagccacgcgatgtaaaaccgtccagcgcctcgccgccgaggacaatgcgctgaaaaccggcgctgatgcgctcaacgcgtaacacagtcagttcacggaagcgcagatcattgcgaacgcgctgcgggtagcggggggtgttattcattgttatcgccttcgtgatggtaatcagatatatctaaataaaactcgcaaatgataatgattgttaatcatgataaatgcaagcgatttgtagaactgatatgtctatagtctgataagacgaaccgcctcttctcaggcatcattactcaacgccggatgcggcgtgaacgccttatccggcctacgtgtgagatgagtccacgtttaaaaatcatttttacacttgcaagaacgctcatatcagatataaattagatatatctaattaagcaaaaggaggctgatatgagccatcatcacgaagggtgttgtaaacatgaaggccagccacgccatgagggctgctgcaaaggtgagaagtcagaacacgagcactgcggacacggtcaccagcatgaacacggtcaatgctgcggtggtcgccacggtcgcggcggcggtcgtcggcaacgtttctttggtcacggtgaattacgtctggtgattctggatattctctcgcgcgatgacagccacggttacgaattgattaaagcgattgagaatctaacccaggggaattacaccccaagcccgggcgtcatctacccaacgctggattttctgcaggagcagtcgctgattaccatccgcgaagaggaaggaggtaagaagcagattgcgctgaccgaacaaggcgcgcagtggctggaagaaaaccgcgaacaggtggagatgattgaagaacgcatcaaagcgcgttgcgttggcgcggcgctgcgccagaacccgcaaatgaagcgggcgctggataattttaaagcggtgctggatttacgcgtcaaccagagcgatatcagtgatgcacaaataaaaaagatcattgcggtgatcgaccgcgccgcttttgatattacgcaactggattaatcgccgcatccgccagtggcgcggtgcaattgccggatgcgacgcttgacgcgccttatccggcctacacccgctacacaccccgcaggcctgataagatgcgccagcatcgcatcaggcattgtgctccaaccgccggatccggcataccgattaatgcagtaccgtcaccgcgtcttccagtcggctggcgcggtgtttcaccatcgccgacacctgcgcactctcttccaccagctcggcatttttctgggtgatcaggttaagctcatccactgcacgggtcaggctggaaagcccatcggcctgttccagcgttgaatggctaatctgggcgatcaactgggtgacgtttttcacctgtgccacaatatcttccatcgtccgtccggcggcgtgtacctgctgcgaaccggattgcaccttatcagcactggcatcaatcagcttgcgaatatcgttggcagcattagcgctgcggctggctaaatgacgcacttcccctgccaccactgcaaaacctttgccctgttcgccggcacgcgccgcttccaccgccgcattcagggccagaatattggtctgaaacgcaatatcgttaatcagcgaagtaatggtgccaatgcgctgggtactgtcggcgatatcgtccattgtcttgatcaccgtggtcatcgcctccccaccctgcactgccgcattactggcagtgattgacagtttatcggcagccgacgccgtggcagagttctgtttcaccgacgccgccatttggttcatggtcgccaccgtttgctgaacgttatcaactgtctgctgggtatgttcgttcagttcatcggtgcctttcgccagcgtctcactgccatttctgacactggacacctggcttgagacatcgttaattagccaacggcacatcaggccaagttgccctaccgcacgtaatgtcagccccagctcatcgctgcgattcagatgctcaacactattacgttctccggtcgccaccttcagtgcctgatgggcaacattttctatcgggcgcacaatctgccattcaaaacaggcgcttgccaacaataccactaacgcacagaggatatacgtcaccaccggggcagcaacaaaccaaagcatggccgccagcaagataaacatcagggtcatcactccacgcgcccgccagcgaagcggtaatgaaggcagtttacccagccagcctttacgcaccaccaggcctttatgaatacgcttactggtacgtccggcgttcaacgctttgtacagcggctccaccgccgcgatctcttcatccgtcgcccgggtacgaatcgacatatagccactgatttttccctcgcgcaccatcggtaccgcattggcccgcacccaataatggtcaccatttttgcggcgatttttcacgatgccgctccagggctccccttttttcagggtgaaccacatatccgcaaacgccgcttttggcatatccgggtgacgcaccatgttgtgcggctgcccttgtaactcttgcaaggtatagccgctcacctgcacaaaagtgtcattagcatgagtgatatagctttgcagatcggtagtggacatcagagtggtatcgtccgccagcggggtattttgctgggtgacatacggatgagaagacatgttcgcgtcctgtgcaggttatatggttgttaacttcttgtcagagtttatgtcggccccgctgcggttatctttaaccgattaatttgatttagatcgcaatttgcgatttaaacacaaatctaattccttgatttaaaatactttcactctgttactatacgaaaacgttaattatcttgcccaaaaatcaggcaattattgccctgaaaacgtgcatttgcgcagcaatcatcaaatccatacccgacaaaaaccgtgcaaaataacaacaaatgttaacagatagcattaaatattgcacaaatgataaccgaatttgtgtttatcccgattttcgcgatcgcagccggagtggcgcaatccctgcaatacttaaatcggtatcatgtgatacgcgagcctccggagcatattttgaacaggttaccttcgagcgcatcggctttagcgtgcagcgcccacgccctgaatctcattgagaagcgaacgctggatcatgaggagatgaaagcacttaaccgagaggtgattgaatacttcaaagagcatgtcaatccggggtttttagagtatcgcaaatctgttaccgccggcggggattacggagccgtagagtggcaagcgggaagtttaaatacgcttgtcgacacccagggccaggagtttatcgactgcctgggaggttttggaattttcaacgtggggcaccgtaatccagttgtggtttccgccgtacagaatcaacttgcgaaacaaccgctgcacagccaggagctgctcgatccgttacgggcgatgttggcgaaaacccttgctgcgctaacgcccggtaaactgaaatacagcttcttctgtaatagcggcaccgagtccgttgaagcagcgctgaagctggcgaaagcttaccagtcaccgcgcggcaagtttacttttattgccaccagcggcgcgttccacggtaaatcacttggcgcgctgtcggccacggcgaaatcgaccttccgcaaaccgtttatgccgttactgccgggcttccgtcatgtgccgtttggcaatatcgaagccatgcgcacggctcttaacgagtgcaaaaaaaccggtgatgatgtggctgcggtgatcctcgaaccgattcagggtgaaggtggcgtaattctgccgccgccgggctatctcaccgccgtacgtaagctatgcgatgagttcggcgcactgatgatcctcgatgaagtacaaacgggcatggggcgcacgggcaagatgttcgcctgcgagcatgagaacgtacagccggatatcctctgccttgccaaagcgctcggcggcggcgtgatgccgattggcgcgaccatcgccactgaagaggtgttttcagttctgttcgacaacccattcctgcataccaccacctttggcggcaacccgctggcctgtgcggcggcgctggcgaccatcaatgtgttgctggagcagaacttaccggctcaggctgagcaaaaaggcgatatgttgctggacggtttccgtcaactggcgcgggaatatcccgatctggtacaggaagcgcgtggtaaagggatgttgatggcgattgagtttgttgataacgaaatcggctataactttgccagcgagatgttccgccagcgcgtactggtggccggaacgctcaataacgccaaaacgatccgcattgaaccgccactgacactgaccattgaacagtgtgaactggtgatcaaagcggcgcgtaaggcgctggcggccatgcgagtaagtgtcgaagaagcgtaatatcaaatcggatggcgatacgacgtcgccatccgatctttttatacgacgcgtacgcccgcaggcatcatccgctccggcgttaacagcacgctttcactgccgtcatcggtttccgcacacaacagcatgcattccgacgtttcaccacgcattttcgctttttgcagattgcataagaccaccaccgttttccccatcagctcttcttcgctgtagtacggcaccaggctggtcacggtttgcagcgttttttgccccacatcaacctgtacgatgtacagcttgtcggcgttttcatggcgtttcacttccacaatctttccgacgcgcatttccagacgtgcaaaatcagcgtaagccacggtttccattgcttcctcccttagggtaaaattttactaaactatagcaaaagtttttctcaatcctgtaggctaaaaatggagaatgcaggcgtgatcacattcgtgagccgctgtgttaccgttacagcgtcaaagaaacgcgctttatttactgaaaacaggtgacccgataagcacttcctctacaatgggggcgcacatcagggaaagtaaaaaaggtaaacatggcaacactaaaagacatcgcaatcgaagctggcgtatccctggcgacagtatccagggtcttaaatgacgatccgacattgaatgtgaaagaagagacgaaacatcgcattctcgagatcgccgaaaagctggagtacaagaccagtagtgcccgtaaactccagacaggtgcagtcaaccaacaccatattctggctatctacagctaccagcaggagctggagatcaacgatccttactatctggcgatccgccacggcattgaaacccagtgcgaaaagctgggcatcgagctcaccaactgttatgaacacagcggcttaccagacattaaaaacgtcaccggtattttaattgtcggcaaacccacgcccgccctgcgcgccgctgccagcgcgttgaccgacaatatctgttttatcgactttcacgaacccggcagcggttacgatgcggtggatatcgatctggcacgcatcagtaaagaaatcatcgacttctatatcaaccagggcgttaatcgtattggttttattggcggtgaagatgagcctggcaaggcggatattcgtgaggtcgcctttgcggaatatggccgactgaaacaagtggtacgcgaagaggatatctggcgcggcggtttttccagttcgtcgggttatgaactggcaaaacaaatgctggcgcgggaagactatccgaaggcactgtttgttgcttccgattccattgctatcggcgtactgcgggcaattcatgaacgaggcctgaacatcccacaggatatttcgcttatcagcgttaacgatatccccaccgcgcgatttacctttccgccgctctccaccgtgcgcatccattccgagatgatgggaagtcagggcgttaacctggtgtatgaaaaagcccgcgatggtcgcgcgctgccgctgttagtcttcgttcccagcaaattaaaactgcgcggcacgacccgttaaatccccttacacactgtccggcaatcgtttttgccggacagtgctgccgtttattttcgtgatccagttaaagtaaatgcatttacctgctactttttagtaaaaattttactaaactccccagcaattacacaaactaccatcaccatgaatggttccgatttctctctaccgggaggccctatgaatcgctgggaaaacattcagctcacccacgaaaaccgacttgcgccgcgtgcgtactttttttcatatgattctgttgcgcaagcgcgtacctttgcccgcgaaaccagcagcctgtttctgcccttaagcggtcagtggaatttccacttttttgaccatccgctgcaagtaccagaagccttcacctctgagttaatggctgactgggggcatattaccgtccccgccatgtggcaaatggaaggtcacggcaaactgcaatataccgacgaaggttttccgttccccatcgatgtgccgtttgtccccagcgataacccaaccggtgcctatcaacgtattttcaccctcagcgacggctggcagggtaaacagacgctgattaaatttgacggcgtcgaaacctattttgaagtctatgttaacggtcagtatgtgggtttcagcaagggcagtcgcctgaccgcagagtttgacatcagcgcgatggttaaaaccggcgacaacctgttgtgtgtgcgcgtgatgcagtgggcggactctacctacgtggaagaccaggatatgtggtggtcagcggggatcttccgcgatgtttatctggtcggaaaacacctaacgcatattaacgatttcactgtgcgtaccgactttgacgaagcctattgcgatgccacgctttcctgcgaagtggtgctggaaaatctcgccgcctcccctgtcgtcacgacgctggaatataccctgtttgatggcgaacgcgtggtgcacagcagcgccattgatcatttggcaattgaaaaactgaccagcgccagctttgcttttactgtcgaacagccgcagcaatggtcagcagaatccccttatctttaccatctggtcatgacgctgaaagacgccaacggcaacgttctggaagtggtgccacaacgcgttggcttccgtgatatcaaagtgcgcgacggtctgttctggatcaataaccgttatgtgatgctgcacggcgtcaaccgtcacgacaacgatcatcgcaaaggccgcgccgttggaatggatcgcgtcgagaaagatctccagttgatgaagcagcacaatatcaactccgtgcgtaccgctcactacccgaacgatccgcgtttttacgaactgtgtgatatctacggcctgtttgtgatggcggaaaccgacgtcgaatcgcacggctttgctaatgtcggcgatattagccgtattaccgacgatccgcagtgggaaaaagtctacgtcgagcgcattgttcgccatatccacgcgcagaaaaaccatccgtcgatcatcatctggtcgctgggcaatgaatccggctatggctgtaacatccgcgcgatgtaccatgcggcgaaagcgctggatgacacgcgactggtgcattacgaagaagatcgcgatgctgaagtggtcgatattatttccaccatgtacacccgcgtgccgctgatgaatgagtttggtgaatacccgcatccgaagccgcgcatcatctgtgaatatgctcatgcgatggggaacggaccgggcgggctgacggagtaccagaacgtcttctataagcacgattgcattcagggtcattatgtctgggagtggtgcgaccacgggatccaggcacaggacgaccacggcaatgtctggtataaattcggcggcgactacggcgactatcccaacaactataacttctgtcttgatggtttgatctattccgatcagacgccgggaccgggcctgaaagagtacaaacaggttatcgcgccggtaaaaatccacgcgcgggatctgactcgcggcgagttgaaagtcgaaaataaactgtggtttaccacgcttgatgactacaccctgcacgcagaggtgcgcgccgaaggtgaaacgctcgcgacgcagcagattaaactgcgcgacgttgcgccgaacagcgaagcccccttgcagatcacgctgccgcagctggacgcccgcgaagcgttcctcaacattacggtgaccaaagattcccgcacccgctacagcgaagccggacaccctatcgccacttatcagttcccgctgaaggaaaacaccgcgcagccagtgcctttcgcaccaaataatgcgcgtccgctgacgctggaagacgatcgtttgagctgcaccgttcgcggctacaacttcgcgatcaccttctcaaaaatgagtggcaaaccgacatcctggcaggtgaatggcgaatcgctgctgactcgcgagccaaagatcaacttcttcaagccgatgatcgacaaccacaagcaggagtacgaagggctgtggcaaccgaatcatttgcagatcatgcaggaacatctgcgcgactttgccgtagaacagagcgatggtgaagtgctgatcatcagccgcacagttattgccccgccggtgtttgacttcgggatgcgctgcacctacatctggcgcatcgctgccgatggccaggttaacgtggcgctttccggcgagcgttacggcgactatccgcacatcattccgtgcatcggtttcaccatgggaattaacggcgaatacgatcaggtggcgtattacggtcgtggaccgggcgaaaactacgccgacagccagcaggctaacatcatcgatatctggcgcagcaccgtcgatgccatgttcgagaactatcccttcccgcagaacaacggtaaccgtcagcatgtccgctggacggcactgactaaccgccacggtaacggtctgctggtggttccgcagcgcccaattaacttcagcgcctggcactatacccaggaaaacatccacgctgcccagcactgtaacgagctgcagcgcagtgatgacatcaccctgaacctcgatcaccagctgcttggcctcggctccaactcctggggcagcgaggtgctggactcctggcgcgtctggttccgtgacttcagctacggctttacgttgctgccggtttctggcggagaagctaccgcgcaaagcctggcgtcgtatgagttcggcgcagggttcttttccacgaatttgcacagcgagaataagcaatgaggatcatcgataacttagaacagttccgccagatttacgcctctggcaagaagtggcaacgctgcgttgaagcgattgaaaatatcgacaacattcagcctggcgtcgcccactccatcggtgactcattgacttaccgcgtggagacagactccgcgaccgatgcgctatttaccgggcatcgacgctattttgaagtgcattactacctgcaagggcagcaaaaaattgaatatgcgccgaaagagacattacaggtagtggaatattatcgtgatgaaactgaccgtgaatatttaaaaggctgcggagaaaccgttgaggtccacgaagggcaaatcgttatttgcgatatccatgaagcgtatcggtttatctgcaataacgcggtcaaaaaagtggttctcaaagtcaccatcgaagatggttatttccataacaaataacaactacggcggcaaaaggagtttgccgccaccgctaccctactcattttcggagatgtgttatgtctgataccaaacgtaatacaatcggcaaattcggcttgctctcgctgacttttgccgccgtttacagctttaacaacgttatcaataataatattgagcttggactggcctcggcaccgatgtttttcctcgcgacgattttttattttattcccttctgtctgatcatcgcagaatttgtttcgttaaataaaaactcagaagccggtgtctacgcgtgggtaaaaagttcgctgggcggacgttgggcatttattactgcctatacctactggttcgtaaacctgttctttttcacctcactgttgccgcgcgttattgcttatgcttcgtatgccttcctcggatacgaatatattatgacgccggttgccaccaccattatcagtatggtgctgttcgccttctccacctgggtttccaccaacggggcgaaaatgttggggccaattacctccgtcacttcaacgctgatgctgctgttaacgctctcctacattttactggcaggtacggcgctggttggcggcgtacagcctgctgacgccatcaccgttgacgcgatgatcccgaacttcaactgggcgttcctcggcgttaccacctggatctttatggccgcaggtggcgcggagtccgtcgctgtgtacgttaacgacgtcaaaggcggttcgaaatcgttcgttaaagtgatcatcctcgccgggatttttatcggcgtactgtattccgtctcctcggtgctgattaacgtcttcgtcagcagcaaagagttgaaatttaccggcggatcggtgcaggtattccacggcatggcggcgtattttggtctaccggaagcgttgatgaatcgctttgtcggtctggtgtcctttaccgcgatgttcggttccctgctgatgtggaccgcaacgccggtgaaaattttcttctccgaaatcccggaaggcatctttggtaagaaaaccgtcgaactgaacgaaaacggcgttccggcgcgcgcagcgtggatccagttcctgatcgtcatcccgctgatgattatcccgatgctcggttccaataccgtgcaggatctgatgaatactattattaatatgaccgccgcagcgtccatgcttccgccgttattcatcatgctggcttacctgaatttacgcgccaaattagatcacctgccacgcgatttccgtatgggctcccgccgcaccggtattatcgttgtttcaatgctgattgcgatatttgccgtagggtttgtcgcttcgacattcccgactggcgcgaatattctgaccatcattttttataacgtcggcggtattgttatcttccttggctttgcgtggtggaaatacagtaaatatataaagggattaacggctgaagagcgccatattgaagcgacgccagccagcaatgttgattaagcagaataataaaaaatgagcaggcattttccctcttcctggatgaggagagggaaaatagtttctgcctttatatttttataattacaacgataaaaggctgtactttttctttagctcatggattaacacaatgaaattaatcactgcaccatgcagagcattacttgctctgccgttttgctacgccttttctgcggcaggagaagaagcacgtccggcagaacatgacgacacaaaaacacccgcaattacctcgacatcttctccttcatttcgtttttacggcgaattaggggttggtggatatatggatttagagggtgagaataaacataaatacagcgacggtacctatattgaaggtggcctggagatgaagtacggctcctggttcggcctgatttacggcgaaggctggaccgtgcaggccgaccacgacggcaatgcctgggtgccagaccatagctggggtggtttcgagggcggaattaaccgtttctatggcggttatcgtaccaatgatggcaccgaaatcatgctcagtctgcgtcaggattcctcgctggatgacctgcaatggtggggcgatttcacccccgatctgggctacgtcattcccaatacccgcgacattatgactgcgctgaaggtacagaacttaagcggcaactttcgttatagcgtcaccgcgactcctgccggacatcatgatgaaagcaaagcctggctacattttggcaaatacgatcgctatgacgacaaatacacctatccggcaatgatgaacggttacatccagtatgaccttgccgaaggcatcacctggatgaacggtctggaaatcaccgacggcacaggacagctctatctcacgggcctgctaactcctaactttgccgctcgcgcctggcaccataccggacgcgccgacgggctggacgtaccgggaagtgaaagtgggatgatggtgagcgccatgtatgaagcgttaaagggcgtttatctctccaccgcttacacctacgccaaacatcgccctgaccacgctgacgatgaaaccacctctttcatgcagtttggtatctggtacgaatacggcggcggacgtttcgccacggcttttgatagccgcttctacatgaaaaatgcctctcacgatcccagcgaccaaatcttcctgatgcaatatttctactggtaataaggactgtaatttcatgaaaataaaaactattttaacgccagtaacctgcgctctgctgataagtttttccgcccatgccgctaacgccgacaattataaaaacgtgattaaccgtactggcgcgccgcagtacatgaaggattacgattacgacgatcaccagcgttttaatccgtttttcgatctcggagcctggcatggtcatctgttgccagacggccctaacaccatgggcggctttccgggcgttgcgctgctgacggaagagtacatcaactttatggccagcaatttcgaccgcctgaccgtctggcaggacggcaagaaagtcgactttacgctggaggcatacagtattcccggtgcgctggtgcaaaaactgacagcaaaagatgtgcaagtcgaaatgactctgcgcttcgccacgccgcgcacgtcactactggaaaccaaaatcaccagcaataaaccgctggatctggtgtgggacggcgaactgctggaaaaactggaagcgaaagaagggaaaccgctttccgataaaaccattgctggcgaataccctgactatcagcgcaaaatcagcgccacccgtgatggcctgaaagtcacctttggcaaagtgcgcgccacctgggatctgctgacctccggcgaatcggaatatcaggtgcataaatccctgccggtgcagactgaaatcaacggtaatcgctttaccagtaaggcgcatatcaacggttcgaccacgctctacaccacctattcccatctgctgaccgctcaggaagttagcaaagagcaaatgcagatccgcgatattctggcgcgtccggcgttttatctcaccgcctcgcagcaacgctgggaagaatacctgaagaaagggttaaccaatccggatgcgacgccggaacagacgcgcgtcgcggtgaaagcgatcgaaacgctcaacggtaactggcgctcaccgggcggtgcggtgaaatttaacaccgttacaccgtcggtgaccgggcgctggttctccggcaatcagacctggccgtgggatacctggaagcaggcgtttgcgatggcgcatttcaatccggacatcgccaaagagaatatccgcgcggtcttctcctggcagatccagcctggcgatagcgtgcgtccgcaggatgtgggctttgtccccgacctgatagcgtggaaccttagccccgagcgtggtggcgatggcggcaactggaacgaacgtaataccaaacccagccttgccgcctggtcggtgatggaagtgtataacgtcacccaagataaaacctgggtggcagagatgtacccgaaactggtggcctatcacgactggtggttacgtaaccgcgatcacaacggcaacggcgtgccggaatatggcgcgacccgcgacaaagcccacaacactgagagcggcgagatgctgtttacggtgaaaaaaggcgataaagaagagacgcagtctgggctgaacaactacgcccgcgtggtggagaaaggccagtacgacagtctggaaattccggcacaggttgctgcatcgtgggaatcggggcgtgatgatgccgccgtctttgggtttatcgacaaagaacagttggataaatatgtcgctaatggcggcaaacgtagcgactggacggtgaaattcgccgaaaaccgcagtcaggacggaacgttgctgggctactcgctattgcaggagtcggtggatcaggccagctatatgtacagcgataaccattatctggcggagatggcaaccatcctcggtaagccagaagaggccaaacgctatcgccagttggcacagcagctcgcggactacatcaacacctgtatgttcgacccgactacccagttctactatgacgtacgtattgaagataaaccactggcgaacggctgcgcgggcaaaccgattgttgagcgcggtaaagggccggaaggctggtcgccgctgtttaacggtgcggcaacgcaggccaatgccgacgcggtggtgaaggtgatgctcgatcctaaagagttcaacacctttgtcccgctgggaacggcggcgttaaccaatccggcttttggcgctgatatctactggcgtgggcgcgtatgggtggatcagttctggtttggtctgaaagggatggagcgttacggttatcgtgatgatgccctgaagctggcggatacgttcttccggcacgccaaagggttaaccgccgatggaccaattcaggaaaattacaacccgctgacaggcgcacagcaaggcgcaccaaatttctcctggagtgccgcgcatttgtatatgttgtataacgattttttccgtaagcaataatttgcaactgctggcggatgcggcgtaaacgccttatccgccctacatgtgcaatcctcctggccggataaaacgcggcaagcgttgcatccggcaactgcaccgcgccactggcggatgcggcgtgaacgccttatccgccctacatgtgtgttcccgtaggtcggataagacgcgacaagcgtcgcatccggcatctgcaccgcgccactggcggatgcggcgtggacgccttatccgccctacatgtgcaattccgtaacctggataaaacgcgacaagcgtcgcatccggcgttatcaccgggcgtattctttttgaatcccatcacaaaccccgcactccccttttcccttttctccggcgacggctaaattagaactcatccgaccacataacaattattttacatactggacaattttatgagctacccgtcgctgttcgccccgctggatttaggttttaccacgttaaaaaaccgcgtgttgatgggctcaatgcacaccgggctggaggaatacccggacggtgccgagcggctggcagcgttttatgccgaacgcgcccgtcacggcgtggcgctgattgtcagcggcggcattgcaccagatttaacaggcgttggcatggaaggtggcgcaatgctcaacgacgccagccagatcccacaccatcgcaccattaccgaagcggtacatcaggaaggcggcaaaatagccctgcaaattttgcataccgggcgctacagctaccaaccgcatctggtcgccccgtccgcattgcaggcccccatcaaccgtttcgtgccccatgagttaagccatgaagagatcctgcaactgatcgacaatttcgcccgctgcgcgcaactggcgcgggaggcaggatacgacggtgtagaggtgatgggttccgaagggtatttgatcaacgaatttctgacgctgcgcaccaatcagcgtagtgaccagtggggcggcgattaccgcaaccggatgcgatttgccgtagaagtagtgcgtgcggtgcgcgaacgcgtcggcaacgacttcattattatctaccgactgtcgatgctcgacctggtcgaagacggcgggacttttgccgaaacggtagagctggcgcaggccattgaagcggcgggcgcgaccattatcaacaccggcattggctggcatgaagcacgtattccgaccattgccacgcccgtgccgcgcggcgcatttagctgggtcacgcgcaaactgaaaggccacgtctcgctgccgctggtaaccaccaaccggattaacgatccgcaggttgccgacgatattctctcgcgcggcgatgccgatatggtatcgatggcgcgaccgtttcttgctgatgcggagctgctgtcaaaagcgcaatcgggacgagccgatgagatcaacacttgtattggctgcaatcaggcctgtctcgatcaaatcttcgttggcaaagtcacctcgtgcctggtgaatcctcgcgcctgccacgaaaccaaaatgccaatccttcccgccgtgcagaaaaaaaatctggcggtggtcggtgcgggacctgctgggctggcgtttgccattaacgcggcggcgcgtgggcatcaggtaacattgtttgacgctcatagcgagattggcgggcagtttaatatcgccaaacagatccccggcaaagaggagttttacgaaacgctgcgctattaccgccggatgatcgaagtgacgggcgtgacgctaaaactcaatcacaccgtgacggcggatcagttacaggctttcgatgaaacgatcctcgccagtgggatcgtgccgcgcactccgcccatcgacgggatcgatcatccgaaggtattgagttatctcgatgtactgcgcgacaaagcgccggttggcaacaaagttgccatcatcggttgtggcgggattggttttgatacggcgatgtatttaagtcagccgggcgaatccaccagccagaatatcgccgggttctgtaatgaatgggggatcgacagtagcctacaacaggctggtggcttaagcccgcagggaatgcagatcccccgtagcccacggcagattgtgatgctccagcgcaaagccagcaaaccaggacaggggttaggcaaaaccaccggctggatccatcgcaccaccctgctctcgcggggtgtgaaaatgatcccaggcgtaagttatcagaagattgacgatgacgggctgcatgtggtgatcaacggcgaaacgcaggtattagcagtggacaatgtggtgatctgcgcagggcaagagccaaaccgcgcgctggcgcaaccgctgattgatagcgggaaaacggtgcatttaattggcggctgcgatgtggctatggagctggacgcacgacgggcaattgcccagggaacacggctggcgctggagatttaaatcgttatttgaagcgccggatgcaacgcatccggcacgtcgcgttaatcaataaacaaggcgggagaaatgccgaatcgcgttgccaattttttagcgtgttccagcgttaatttcctcttcccgctcaaaacgcgtgacaccatagatttactgccaatttccggcagatcggaaagggttaaaccatattgatccataagggtacgaatcacggctataccgccaggcatggcttgagccatggcattaaattccgcaaattcgggcgctgattcttcccacgcggttattttggcacacaccagatccagcaaggggttttcaggatcgttgagcagcagatgatctaccagttccagcgcctgggtgtattgttcctcgttctgaatacccgccagaaaaggtgccacagcagttagcttttctcctgcttgcaagatgtcggcaatcgcaatcattttttccccttagtacgatgaacagcggtaaagaaatcgtattctttatgcgtcataacttcacgtatgtagcacttttgcgattcaaaaaagaccattgctacaacacgtaattcattgcccccaacattgaaaacataatgcttatccagatatttgaagttatccagagatgggaatactgcttttaatgactcaggttttttgaaatatcccttagcaatcgtgttccccagagccaccaactccgttttatgttgcgggtatttttccgcagcatctttcaatgctttttgagttatcaggtgcattcttcatcacgtccgttgacaaattggcaatatgataacatccgttgccagattggcaacggatgaatttatctgtgtgacggaagaataaacgtagaaaaacgctaaacaagagaatgtagacgatggtgacagggattttttgttttatggaagcgcgattccagaactgggcagacattgccggatgcgacgcttgccgcgtcttatccggcctggagtaacgtgctgaacgtaggccggataaggcgtttacgccgcatccggcaggtaactcccaatcttaccgacgacgtcccagcttcaccgctttcagtaccacaaatttattattcgtcgcaatagtggtgcagttgccgaaaatcttcttcagtttatggaagtaatccaggtgacggttggcaacgatatacagctcgccgttgattttcaggcagcggcgggcgtggtggaacatctcccaggcgacgttatcggtcagcgcatgttgttggtgaaacggcgggttgcagagcacagcattaaagcggaaaggctccacgccggagagcgcgttgttgatcataaactcgcagcgatccaacgcctctggcatgttggtttcaacgttcaaacggctggaagcaaccgccatcggcgattcatcgacaaacaccactttcgcctgcgggtttttatcaagcagcgtcagaccaataacgccattaccgcaaccgagatcgacaatctccccttcgagattctctggcagatgttgcataaagaagcgcgcgccgatatcaagcccggtgcgggagaagacattcgcatggttgtggatagtccagtcagtaccttccagcttccagctaacggtctgcggcgcatcggccagctgcggttcattgaaagtgcaattaatcaggcgcgcttttttccatgccagcgtggtggtggttgggccgagcactttttcgaacagttccagcgtggaagtgtgaatgtcacgggccttggcaccggcaataatacgtgtatccgacgtgaccactttgcgcagcgcacgcagttgctgttccagcaatgccagtgttttcggcactttgatcagcaccacacccggctgttgcgggtagtcggcggtgctgtcgagaaacttcacgctcgactcatcaatcccgttgaggcgtaaattctcgcgcgtcgccagttcactgatgtatgagtcgccaatgctgtacggcttatgttccgccagtgcgcagcttaacgcaccaaaggcatcattcaggatcaacaccgggccgcggatttctgtgtcgtccaactgttgcagcaaatattcatccgccgcttcccacgcctgtagcgggttaacgtcatccgtcgccggaaaacgttgtagtgtcagtgaacggaaaccgttgtctaagtggctcatcggccctcctgaatgataaaatttcgacattgcccctgaaaagggtgcgtgagtataccctttttctctttttcgtgggcggttatgagcaatcttacttatcttcagggttatcccgagcagctactttcccaggtgcgaacactgattaacgaacagcgtctgggcgatgtgctggcaaaacgctatccgggaacacacgactacgccaccgataaagccctctggcaatatactcaggatctgaaaaatcagtttctgcgtaatgccccgccgatcaataaagtgatgtatgacaataagatccatgtgctaaaaaacgcgctcgggttacataccgctgtttctcgtgtgcagggcggcaagctgaaagcaaaggtggagatccgcgtcgctaccgtgtttcgcaacgcgccggaaccgtttttgcgcatgatcgtggtgcacgagctggcgcacctgaaggagaaagagcataacaaagcgttttaccagttgtgttgtcatatggaaccccagtaccaccagcttgagttcgacacccgactgtggctaacgcagttgtcgcttgggcagaacaaaatctgaaaatgatgtcaggcgttatcttttctttctttagcgcctaaaatcgacctcccccctttcgttaaggataacgaccatgctgcgcgcatttgcccgccttcttctccgtatttgtttttctcgccggactctaaagattgcctgcttactgttacttgtggcaggagcgaccatccttatcgccgatcgcgtaatggtcaacgccagcaaacagctgacctggagcgatgtcaacgccgttccggcgcgtaacgtgggtttattgctgggggcgaggccgggtaatcgctactttacccgacgtattgataccgcagcagcgttgtaccacgccggaaaagtgaaatggctgctggtaagtggcgataacggacgtaaaaattacgatgaagcatcaggtatgcagcaggctttgatcgctaaaggcgtaccagcaaaagtgatcttctgcgactatgccggattctcaacgctggattcggtagtgcgtgccaaaaaggtttttggtgaaaaccatatcaccattatctcgcaagaatttcataatcaacgcgccatctggctggcaaaacagtacggcatcgacgctatcggttttaacgcgccagacctcaatatgaagcacggtttttatactcaactgcgggagaaactcgctcgtgtcagcgccgtgattgacgccaaaatcctccatcgccagccgaaatatctcgggccttcggtcatgattgggccgtttagtgagcatggctgtccggcgcagaaataatgcgtatctgcgcacgtcgaagatgaaaaaggcgtgctacattgacgacagaatccctttatggagtatccacgcgttatgatacgtttcgctgtgattggtacgaactggatcactcgccagttcgtcgaggccgcccatgagagcggtaaatacaagttaaccgccgtatattcccgcagccttgaacaggcccagcacttcgccaatgatttttctgtcgagcatctgtttacctcgctggaagcgatggcggaaagcgatgccattgacgcggtgtatattgccagcccgaattccctgcatttttcccagacacaacttttccttagccataaaattaatgtgatttgcgagaaaccgctggcgtcgaatctggcggaagtggatgccgccattgcctgtgcgcgggaaaatcaggtggtgctgtttgaggcatttaaaaccgcctgcctgccgaactttcatttgttgcgccaggcgctgccgaaagtcggcaaactgcggaaagtctttttcaactattgccagtattcctcgcggtatcaacgttacctggatggtgagaatcccaacacctttaatccggcattctctaacggttcaattatggatatcggtttttactgtctggcgtcggcggtggcgttatttggtgagccgaaaagcgtgcaggcaaccgccagtttgctggcaagcggcgttgacgcccagggcgtggtggtgatggattacggtgatttcagcgtcaccttgcagcactcaaaagtcagtgattctgtcctggcgagcgagattcagggcgaagcaggatcgctggtgattgaaaaactgtctgaatgccagaaagtgtgcttcgtgccgcgtggcagccaaatgcaggatctcacccagccgcagcatattaataccatgctctacgaagcagagctgttcgctaccctggtggatgagcatctggtggatcatccagggctggcggtcagtcgcatcaccgccaaactgctgaccgagatccgccgccagactggggtgatttttccggcagatagcgtaaaactataattgccaaagtaaaacagtgtaaaaggtatgtaacagaccattgactggctgaatggtctgtcatactttgttacctgcaaaggggagtaacttcattgccggtcgatcgtcattacgatgtgtgaaaaaacacatccggtcaccgggcaacccgaaaggaatacgcagacgtattccttttttgttgtaagtgagaccttgccggaaggcgaggtctatgcataaaaagcagcggctgacgtcttccgacgttggccgtttttttatgtgtaaggaacttctatgaatactgtcggcacgccgttgctatggggcggattcgctgttgttgtcgccattatgctggctatcgacctgttgttgcaggggcgtcgtggggcacatgccatgaccatgaaacaggctgcggcctggtcgctggtctgggtgacgctgtcgttactgtttaacgccgctttctggtggtatctggtgcaaaccgaaggtcgcgccgttgccgatccacaggcactggcctttctcacaggttatctgattgagaaatcgctggcggtcgataacgtctttgtctggctgatgttgttcagctatttctctgttccggcggcattacaacgccgcgtgctggtgtatggcgtgctcggggcgattgttctgcgtaccatcatgatcttcactggcagctggctaatttcgcagttcgactggatcctgtatatcttcggtgccttcctgctgtttaccggcgtgaagatggcgctcgcccatgaagatgaatcaggcattggcgacaagccgctggtgcgctggctacgcggtcatttgcgcatgaccgacaccatcgacaacgagcatttctttgtgcgtaagaatggattgctgtacgccacaccgctgatgctggtactgattctggtggaattgagcgacgtgattttcgccgtggatagcattccggctatcttcgccgtgaccactgacccgttcattgtgctgacctcaaacctgtttgcgatcctcggcctgcgtgcgatgtatttcctgctggcgggcgtagcagagcgtttctcgatgctcaaatatggcctggcggtgattctggtgtttatcggtatcaagatgctgattgtcgacttctaccatattccaatcgccgtctcgctgggcgtggtgtttggcattctggtgatgacgtttattatcaacgcctgggtgaattatcggcatgataagcagcggggtggataatttttaatctgcctaagccgtgtaccctgtcattaacatgagcaccgttttctccctctcccttccagggagagggtcggggtgagggtaatttttcgcaccgatgctggcctgttcccctcaccctaaccctctccccaaacggggcgaggggactgaccgagtccttttttgatgttgtcatcagtctggaagccgcacgttggctttatttttatgtcaaagaaatgtaaccattaagtttcaaaatatgacctctctttaaaatccagcatttttcgcttcccgaagctgtaactttccttatactcgaccttgcaaacactttgttacatcctgaaagatgcgtcgacagaacgcaccagggatgtgcgacaacacaatgaaaggatcgaaaaatgactacgcaacgttcaccggggctattccggcgtctggctcatggcagcctggtaaaacaaatcctggtcggccttgttctggggattcttctggcatggatctcaaaacccgcggcggaagctgttggtctgttaggtactttgttcgtcggcgcactgaaagccgttgcccccatcctggtgttgatgctggtgatggcatctattgctaaccaccagcacgggcagaaaaccaatatccgccctattttgttcctctatctactgggcaccttctctgctgctctggccgcagtagtcttcagctttgccttcccttctaccctgcatttatccagtagcgcgggtgatatttcgccgccgtcaggcattgtcgaagtgatgcgcgggctggtaatgagcatggtttccaaccccatcgacgcgctgctgaaaggtaactacatcgggattctggtgtgggcgatcggcctcggcttcgcactgcgtcacggtaacgagaccaccaaaaacctggttaacgatatgtcgaatgccgttacctttatggtgaaactggtcattcgcttcgcaccgattggtatttttgggctggtttcttctaccctggcaaccaccggtttctccacactgtggggctacgcgcaactgctggtcgtgctggttggctgtatgttactggtggcgctggtggttaacccattgctggtgtggtggaaaattcgtcgtaacccgttcccgctggtgctgctgtgcctgcgcgaaagcggtgtgtatgccttcttcacccgcagctctgcagcgaacattccggtgaatatggcgctgtgtgaaaagctgaatctggatcgcgatacctattccgtttctattccgctgggagccaccatcaatatggcgggcgcagcaatcactattaccgtgttgacgctggctgcggttaatacgctgggtattccggtcgatctgcccacggcgctgctgttgagcgtggtggcttctctgtgtgcctgtggcgcatccggcgtggcgggggggtctctgctgctgatcccactggcctgtaatatgttcggtatttcgaacgatatcgccatgcaggtggttgccgtcggctttatcatcggcgtattgcaggactcttgcgaaaccgcgctgaactcttcaactgacgtgctgttcactgcggcagcttgccaggcagaagacgatcgtctggcaaatagcgccctgcgtaattaattgtttaacccctttcgtctacggcggaaggggttttctcaactttaaacggatcaattccccttttctgcatccgccagaaacgaatgatattcaggccattcataagcagaaaactaccctcaatcatcgtgccgcctatcgaccccgcccagaagttgtgaatcacccagcaacacgttgaaaaccacattacgcagcgcatggtcagccctttacagcagaatagcgcccaggtactgacaatcgtgccgataaccggcaatagttcgacaggatgatggaacttcgcgaggccaattccgccagtcagcacaataaaaatcgccattacccataagctgcgcgtgcgtaaggtaatcaatgtacgaatggcattaaggatggcactggcaccagcgggataggtgcccagaagaaaaaaatgtacgccaataacggcgctatagaccgaaagctgctttttgaagcgacgttcgtcacgattgaaaaatgttgtgataccaatcagaaaggcgatgacacccacgccctgggccagccaatacgcggtcatgataaatccttagcaggtatggaaaagcaaacggcgcttcacattatgaaacgccgttttttattaacaactcatttcgactttatagcgttacgccgcttttgaagatcgccagttcgcggaagtcgttacgctcgttacaggtttgcttaccgttggcaaactcaacgatggtgtcgataaattcttccagcaactgcggcatcgctttaccgtggatcaactgacccgcgtcaaagtcgatccagtgttttttcttcgccgccagttcactgttggtggcgattttcaccgtcggcacaaatccaccatacggcgtgccacgaccagtactgaacagcaccatatggcagcccgcacccgccagggcgctggtcgctacggcatcgttacccggcgcacttaacaagttcagccctggcgttttcagacgctcgccgtaacgcagcacgtcaaccacgacgctggaacccgctttctgggtacagccaagtgatttgtcttccagcgtggtgataccgcccgctttgttccccggcgatgggttttcatagatcggctgatcatgggcaataaagtactgtttgaagtcgttgaccatggtgaccagtttttcaaacgttgcttcgtcgcggcaatggtccatcagcaactgctctgcgccaaacatctccggcacttcggtcagtacggtagtaccgccgttagcaatcacgtagtcagagaaacgccccagcatcgggttagcagtaataccagaaagaccgtcagaaccaccgcactccagaccaaacttcagttcgctgagtttgcctggctcgcgtttatcgttgcgcatcacgttatacagctgatgcaaatgctcgattccggcttcgatctcatcatcctgctgttggcagatcatgaaatgaacgcgttcaggatcgatatcgcccagcgtttcacggaatgcggcaacctggttgttttcacagcccagaccaatcaccagcactgcgcctgcgttcgggtggcgcaccatgttttgcagcatggtgcgggtattaatgtgatcgtcgcccagctgtgagcagccgtaggtgtggctgaagaggaacacgccgtcagtaccttcggcgttgttggtctctttcagaaaacggttctggatctgccgcgcgatgccgttgacacagcccacggttggcaggatccacagctcattacgcaccccgacatcgccgttagcgcgacgatagatctgcacttcacgatctgccgcttgcgcaggcagatcctgaaaatcaggttgatagcgatactgatccagatcgctcagattcgtgcgcgtattgtgggcgtgaacgtgaacacctgccgcaatatccgccaatgcataaccaatcggcaggccatatttgatgacattggccccttttgcgatatccgttaacgcaaatttatgtccacgagcaacatcctggcgcagcgtaacagtctggttatcgacactgacttctgtgccttcagccaaatctgctaaagcgaccgcgacgttatccagcgcatggatcttgatgtattgcatatcaaccccagaccttagttcagttcaatggcgaagtagtcacgcgcattgttaaagcaaatatttttcaccatctcgcccagcaggttgatgtccgccggtgcttcgcccgcttccacccagcgaccgatcatctggcacagaatgcggcggaagtattcgtgacgggtgtatgacaggaagctacggctgtcagtcagcataccgacaaagcggctcagcagaccgagctgcgccagttgggtcatctgacgttccataccgtctttctgatcgttaaaccaccagccggaaccgaactgcattttgcccggcataccttcgccctggaagttaccgatcatggtgcccagcacttcgttatcgcgcgggttcaggcagtacagaatggttttcggcagcaggttttcttcattctgcttgctcagcaacttagacagctcttccgccatcggacggtcgttgatggagtcaaagcctacatccggccccagcagtttgaactgacgcaggttgttattacgcagcgcgccaatgtggtactgctgtacccagccgcgacgtgcatattcggcaccaaggaacaccagtaccgcagttttgaactgcgccacttcgtgctcgctcagggtttcgccagccagacggcgcgccagaatgctgtccagttccgcttcgttcgcttcagcaaacatcaccacatccagcgcgtggtcagacactttacagccgtgagcggcgaagtgatccagacgtttggtcagggcagtttgcaggtcagcaaagcggcgaatgtcggtatcggaaacttcgcccagcttcgccatgtagtcgttaaaggtcgcctgttcgatgttgaaggctttgtccggacgccagctcggcagcactttgatggtgaaagagccgtctttggcgatctctgcgtgatgctccagagaatcgatcgggtcatcggtggtgccgaccattttcacgttcatctgctgcatgatgccgcgcgcggagaagttatcctgcgccagcagttcgttacattcgttccagatttcatcggcagttgacggagaaagcaatttgccagtgataccaaacggacggcgcagttcgaggtgcgtccagtggtataacgggttgccgatagtgtgcggaacagtcgccgcccaggcgtcaaatttttcacggtcagacgcatcaccggtacacagacgctcggccacaccgttggtacgcatagcgcgccatttgtagtgatcgcctttcagccagatgtcatacaggtttttaaaacgatagtcttccgcaatctgctgcggcggcaaatggcaatggtaatcgaaaatcggctggtcttttgcgtagtcgtgatacagacggcgggcaaattcggtatctaacaggaaatcttcagtcataaacggagtcattttcgtcttcctctcaacgagtgagctagcttgcttatggtgcgatgctgacaaagttatcacaccaatttccagagtccgaagatattttcgtgagttagatcaataaacgtagttaaaaaaattactctcaaagtggtaaatctcgctgcaggccgcgccagtactggccttgctgtcgtcaggtaatgtccctacaaatattcccacatttgtgatggctctcaccttttaaagttgtatgacaagttatctttctgccgtcgcaaatcataagtcgacggaatgcaaattgccgattcattcatttgttagatgaatcgggttaaccggtacggaagccgaattagcacgaaactttcatggcaacgttcggggcgtgccggttttttttcggttacccggtcgtaactaacatcttcagcctctggcgggatgatggccgcgcttcctgcggatataacaaaacgatgaggttttacatgcgtaaaattaaagggttacgttggtatatgatcgcactggtgacgctcggcaccgtgcttggttacctgacgcgtaacactgtggcggcagctgcgccaactctgatggaagagttaaacatctccacccaacagtattcctatatcatcgcagcctattctgctgcttatacggtcatgcaaccggtagcaggttatgtactggatgtgctgggtacgaaaatcggttatgcaatgtttgctgtgctgtgggccgtgttctgtggtgcaaccgcgctggcaggtagctggggtggcctggctgttgctcgtggtgcggtcggtgccgcggaagcagcgatgatcccggcgggtctgaaagccagctccgaatggttcccggcgaaagagcgttccatcgcagtaggctactttaacgtaggttcttcgattggtgcgatgattgcgccgccgctggtggtatgggcaatcgtaatgcacagctggcagatggcatttatcatctccggtgcattgagctttatctgggcgatggcatggctgattttctataaacatccgcgcgaccagaagcatctgaccgatgaagaacgcgactatattattaatggtcaggaagcccagcaccaggtgagcacggcgaagaaaatgtccgttggtcagatcctgcgtaaccgtcagttctggggtatcgcgctgccgcgtttcctggcagaaccggcctggggtacttttaacgcgtggatcccgctgttcatgtttaaagtttacggctttaacctgaaagagatcgcgatgttcgcctggatgccgatgctgtttgctgacctcggttgtatcctcggtggttacctgccgccgctgttccagcgttggtttggtgtgaacctgatcgtttcccgtaagatggtcgtaacgctgggtgcagtgctgatgattggcccgggtatgatcggcctgttcaccaacccgtatgtcgcaattatgctgctgtgtatcggtggttttgcccaccaggcactgtctggcgcgctgattacgctctcttccgatgtgtttggtcgtaacgaagtggcaacggcaaacggtttaaccgggatgtccgcatggctggcaagtacgctgtttgcgctggttgtcggtgcactggctgacaccatcggcttcagcccgctgttcgcagttctggcagtgttcgacctgttaggtgcgctggttatctggaccgtgttgcagaacaaaccggcgattgaggtggcgcaggaaacacataacgatcccgcaccgcaacattaacgtttcgtgtaagttttagtttcccttcaaagccgccttctcaggcggctttttcatcactgcgagtagagctaaactcgcaaaagtggtataacaaatatagtctgccgtatcatgcctggagcgcatatggaaatcactgaaccacgccgtttgtatcaacaacttgccgctgacctgaaagagcgcatcgaacagggcgtctatctggtgggtgataaactgcctgcagaacgctttattgccgatgaaaagaacgtcagccgtacggtagttcgtgaagccatcatcatgctggaagttgaaggctatgtcgaagtgcgtaaaggttcaggtattcatgtggtttccaaccagccgcgccatcagcaggcggctgacaataatatggaattcgccaattacggtccgtttgagttgcttcaggctcgccagctcatcgaaagtaatattgccgaattcgcggcaactcaggtaacgaaacaggacatcatgaaactgatggccattcaggaacaggcgcgcggcgaacaatgcttccgtgattccgagtgggatttgcagttccacattcaggtcgctctggcgacgcagaactccgccctggcggctatcgtggaaaaaatgtggacccagcgtagtcataacccgtactggaaaaaactgcacgaacacattgattcccgtaccgtcgataactggtgtgatgaccacgatcaaatcctcaaggcgctgattcgcaaagatcctcatgctgctaagctggcaatgtggcagcatctggaaaacaccaagatcatgttatttaacgaaaccagcgacgacttcgagttcaatgccgaccgctatctattcgccgaaaacccggtggtgcatctcgatacagccaccagcggcagtaaatgaaattcctgtccgacaggcgctgcaatgcgcctgtttgtctcgtcggtaagcgaaaagtataaagtgtcagcctgtgtaaatcctctcgccaccctcccctgcattcagcaaaatcagactccacggacatgtaattttgataacgaacaacgttgacctttgttacaattagattcaatttgaatttatgtttttgaatgctttcttatctcacgatttaacagggaatagttcaggctgtgttgatgtatcaaacccgcagaacataccaaaacagcaataacattgcggtagtgcatcttttaaaaccagcgtggcgttaaccgattcaccaggaataatgaatggaacttttgacccaattgctgcaagccctgtgggcgcaggattttgaaaccctggccaatccatcgatgattggcatgttgtattttgtcttgtttgtaattttgttccttgaaaacggcttgcttccggcggcctttttaccgggcgacagtttactggtattggtcggcgtgttgattgcgaaaggcgcgatgggctatccgcaaacgattctgctgctgaccgttgccgccagcctcggctgctgggtcagctatattcaggggcgatggctgggcaatacccgcaccgtacaaaactggctatctcatttacccgcgcattatcatcaacgcgcacaccatctttttcataaacacggtttatcggcgctgttaattggtcgctttattgcgtttgtcagaacactgctgccgacgattgccgggttatcagggctgaataacgcgcgctttcagtttttcaactggatgagcggtctgctgtgggtattgatcctgacaactctgggttacatgctcggcaaaacgccggtatttttaaagtacgaggaccagctgatgtcatgcctgatgctgctcccggtggtgctgctggtgtttggcctggcaggttctctggtcgtgttatggaaaaagaaatatggaaatcgggggtaagggatgcaaatacctcgcatgtcgcttcgccagctagcctggtccggcgctgttttacttctggtcggcacgctgttgctggcctggtccgcggttcgccagcaagagtctacgctggcgattcgtgccgttcatcaaggcacaacgatgccagacggtttttcaatctggcatcaccttgacgctcatggcattcctttcaaaagtatcacccccaaaaacgacactctgttaattacatttgactccagcgaccagagcgccgccgcaaaagcggtcctcgacagaacattgccccatggctacatcattgcgcagcaggacaataacagtcaggctatgcagtggctgacccggttacgggataactctcatcgcttcggataacttcctgttatccgaaacatatcactcactttggtgatttcaccgtaactgtctatgattaatgaggcggtggttaacactaccgcttcgttgtctggacaatcgttcctttgtaataggtccgaatcacaatggaaggttcaagaatgaaataccgcatcgctttagctgtttctctctttgctcttagtgccggtagttatgccactaccctgtgtcaggaaaaggagcaaaatatccttaaggagatcagctatgccgaaaaacaccaaaaccagaatcgtattgacggtctgaataaagccctgagtgaagtccgggccaactgttcagatagccagctgcgtgccgatcatcagaagaaaatcgcaaagcagaaagatgaggtggcggaacgccagcaagatttagccgaggcgaagcaaaaaggcgatgccgataagattgccaaacgcgaacggaaactggcagaagcgcaggaagagctgaaaaagctggaagcgcgcgactactaactcacaatagtcactacttactcacctggagaaaactatgtcgaaagaacacactacggaacatctgcgtgctgagttgaaatccctttccgatacgctggaagaggtgcttagctcatctggcgagaagtcgaaagaagagttgagtaagattcgtagcaaagcggagcaggcactgaaacagagccgttatcgcctgggtgaaaccggtgatgccattgccaaacaaacccgtgtcgcggcggcgcgtgccgatgagtatgtgcgcgaaaatccgtggacgggcgtgggcattggcgctgcaatcggtgtagtgctcggcgttctgctgtcgcgtcgttaattatggcggacactcatcacgcacaagggcccggtaaaagcgttctgggcatcgggcagcgaattgtttctatcatggttgaaatggtagagacacgtctgcggctggcggtggtggagctggaagaggaaaaagcgaatctctttcaacttttactgatgctgggcctgacgatgcttttcgctgcatttggtcttatgagcctgatggtgctaattatttgggcggttgacccgcaatatcgcctgaatgcgatgattgccaccaccgtggtgttgctgctactggcactgattggcggtatctggacgctacgtaaatcgcgtaagtctacgttgctgcgccatacacgccatgagttagcaaacgatcggcagctgctcgaggaggagtcccgtgagcagtaaagtcgaacgtgaacgacgtaaggcgcaactgcttagccagatccagcaacaacggctggatctttccgccagtcgtcgtgaatggctggagacaacaggcgcttacgatcgtcgctggaatatgctgctaagtctgcgctcctgggcgctggttggcagtagcgtgatggcgatctggacgattcgccatcctaatatgctggtccgctgggccagacgcggttttggcgtatggagcgcctggcgtctggttaaaacgaccctcaagcagcaacagcttcgcggttaacttccctctggccggagccattccggccttatccctcaaattttttgaagatttttgacagttttccttgctaacaatcatcattcaccacgtttatgattctctccatcgacagcaacgacgctaataccgcgccattgcacaaaaaaacaatcagcagcctgagtggcgcagtggagagtatgatgaaaaaattagaagatgttggtgtactggtagcgcgcattttaatgccgattctgtttattaccgctggctggggaaaaattactggctacgcgggtacccaacaatatatggaagcaatgggcgtcccgggttttatgctgccactggtgattctgcttgagtttggtggtggtctggcaatcctgttcggtttcctgactcgcaccacagccctgtttactgcgggctttacgctgctgacggcatttttatttcacagcaactttgctgaaggcgtcaactcgctgatgttcatgaaaaacctgacaatttctggcggattcctgctgctggcaattaccggtccgggcgcgtatagcatcgaccgcctgctgaataaaaagtggtaagcacgcgctatacttaacgataaaaaacgaggaggaagctcctcgtttttgctattggaggagagaaaaatgggtcaactgattgacggcgtctggcatgacacctggtacgataccaaatctaccggcggtaaatttcaacgttcagcttccgcatttcgtaactggctcactgccgatggcgctcctggccccactggcacaggcggttttatcgcagagaaagatcgttatcatctctatgtttcactcgcctgcccgtgggcgcaccgcacgctgatcatgcgcaaactcaaaggactggaaccgtttatttccgtttccgtagtgaacccgctgatgctggaaaacggttggacctttgatgacagttttccgggagcaaccggagacacgctctatcaaaatgaatttctgtatcagctttatctccacgccgatccacactacagcggacgagttactgttcccgtgctgtgggacaaaaagaaccacaccatcgtcagcaacgaatcagcagaaatcatccgcatgttcaataccgcgtttgatgcgctgggcgcgaaagcgggtgattactaccctccagccctgcaaacaaaaattgacgaacttaacggctggatttatgacaccgttaacaacggcgtgtataaagctggttttgccaccagccaggaagcttacgacgaggcggtggcgaaagtgtttgaatcgctggcacgactggagcagattttaggccagcatcgttacctgaccggcaaccagctaaccgaagccgatattcgcctgtggactacgctggtgcgttttgatccggtgtatgtgacccacttcaagtgtgataagcaccgcatcagcgattacctgaatctgtacggttttctgcgcgatatctaccagatgccggggatcgccgaaacagtcaatttcgatcatatccgtaatcattacttccgcagccataagaccatcaaccctacggggattatttcaattggtccgtggcaggatctcgatgaaccgcatggacgagatgttcgcttcggttaaaaaaaggcaccttacgaggtgcctctgataattagctaagtgcatgttgttcatgtcggatgtggcatgaacgccttatctgacatacaaaacattgtacattcaatagattgcataacccgcgcagaccagataagcgtagcgcatctggcgattttgcgcttgtcatcagtcttagcgcgccttcacggcactttattaattccttgaacgaatatttactgccatttcattcacgtctattcttaatttgctgctttaaaaacaagtgattgagcaaaattgaggcaaaaatggactggtatctgaaagtactaaaaaattatgtcggtttccggggtcgtgcgcggcgcaaagagtactggatgtttattctggtcaacatcatctttacgttcgtgctggggctgctggataaaatgttaggctggcaacgcgctggtggcgaaggcatcctgacgacaatctacggtattctggtgtttttaccgtggtgggcggttcagttccgccgcctgcacgacaccgaccgctcggcgtggtgggcactgctattcttaatcccgtttatcggctggcttattatcatcgtctttaactgccaggcgggtacgccaggcgaaaaccgctttggaccagatccaaaactggaaccttaaaacaaatctgctcgccggatgtctgactcatccggcttttatcattatgttgatgaatgaataatttactaatgtttatttaaaatatttcaatgtcgttatataaattacctataaaaaataaccatgtatttatcttaaatatcaaaacctttataacatccgaaaaagaaagatacgaatagcatttacacaatacccggaatagactttcgtcacttttaattaaagggatgtttttatgcagtggtatttgtccgtattaaaaaattatgttggtttctctggtcgcgcacgtcgtaaagagtactggatgtttactctgattaacgccatcgtcggcgctattatcaatgtcattcaattgattttaggtctggagcttccatatctgtctatgctttatttgctggcaaccttccttcccgtccttgcgcttgctatccgtcgcttacacgataccgaccgttcaggtgcctgggccttgctcttttttgttccgtttattggctggctcgtgcttctggtttttttctgcacagaaggtacttctggcagcaatcgttacggaaacgatccgaagtttggttcaaattaatcttagaattggggcgatatttcgcccctttttattaacaataataaatattattttccgttaaaaagtttgggaatttcccgcagacaccaggatttcgcttcccccatactgtcacgacgccaggccataataatatcgatctcgctggtcgattccgggctgacgacacgcaaccgcccttccgcaatatctttttcgaccataggatacggcatcgtcgccacgccaagccccgccagtaatgcctgacgtttatcttcaatcgtgctcaccgttaagcgcggctgtttgtccagcagctgtacggtcaacaccgggcgctcacgagcggtatccgccaccgcaattccacgatatttcacacgcgtcacttcagataacggttccggctcctgatgaatcgggtgatcaggcgcggcaacgtagacgttcattaacgtatagagcttgcgcgagttgatctccgacgaggaacgaaaatgcatatccggcgcgataacaatatccgcccgcccctgctccagccgttcccacgcccccgccagcacttctgtgatgattgccagttgggtattggcttttgccgccagtttgtcgattaacgggaaaaaggcaggtgtcggtaccagcgcttcggtcacaatggtgagatgcgtttcccaaccgcgcgcgagagcttccgcatcagtagtcagtttatctgcggcttccagcaaaacgcgccctcgctccaacaacatcctcccgacattggtgaatttggtacgatggcccgagcggtcaaacagcaccacatccagctcttcttccagtttttgcatggtgtagctaagtgcggaaggcacgcgtcccagctcatccgccgccgccgcaaaactgccccggcgatcgatcgcatccataacccgtagtgcttccagcgttaatgccctttctttggccatttcgttctcattcaggaaatttgaacataccgggcagaatatctggctaacaatgtagcgtccagccccttaccataaaaggaagtaaagagaggtcaagaattatgattactacccgaactgccaggcagtgtggacaagcagactacggatggttgcaggcccggtatactttttcctttggacactacttcgacccgaaattgttaggctatgcctccctgcgtgtgcttaaccaggaagtgctggccccaggtgccgcctttcagccgcgaacctatcccaaagtcgatattttaaatgtgattctggatggagaagcagagtatcgcgatagcgaaggcaatcatgttcaggccagcgccggagaggcgttgctgctctctacccagccgggtgtcagctatagcgaacacaatctcagcaaagacaaaccgttaacgcgaatgcagctttggctggacgcctgcccgcagcgagagaatccgctgattcaaaagctggcgcttaatatgggcaagcagcaattaatcgcctcgccagagggtgcgatgggaagcctgcaattacgccagcaagtgtggctgcaccatatcgtgctcgacaaaggcgaaagtgcgaatttccagttgcatgggccacgcgcgtatttgcaatcgattcacgggaaatttcatgcgcttacgcatcatgaagagaaagcggcgctgacctgcggtgatggggcgtttattcgtgacgaggctaacattacgctggttgccgattccccactgcgcgctttgctgatagatttgcctgtctagttgtttttacagggagatgatgatgagtaaaaaattggccaaaaagcgccagccggtgaagcccgtggtggcgaaagaacctgctcgcaccgccaaaaattttggctatgaagagatgttgagcgagctggaagctatcgtcgcggatgctgaaacgcgtttagccgaggatgaagctaccgcgtaaagacaggttgccggatgcggcgaaaacgccttatccggcctacaaaatccaacaacattaacgaattaaacaacccgtaggccggacaagatgcgccagcatcgcatccggcacgatccccaaaacctggcgtttatctggccttgctcgccataatctcgataatctgccgatccgtttgctgcatcgaatggcttgctaacgcacacaggttggcaatcgactgctcaacatcatgcgccacaatcccttcattgccggtcacggcggtatcatccagcgccattaacaccgctttccacgcagccgaagcactggtcgaaaccttcatcgcgcagctgttcgacgcaccatcgcaaatcatgccgctgacatcgccgatcatactgctgatcgccatcgagatggtttcataacgcccatccaccagccatgccatcccggcggcggcccccattgctgcggtcgttgcggcacacagcgcagacaaacgcggtaactggttatggatgtaaattgcgctcaaatgcgaaagcatcagcgcacgcgccagccgttcatcatccgctccgaagtgttctgctaccaccaccacaggcattgttgcggtaatcccctggttacccgagccggagttactcatagccggaagcgtagcgccgcccatacgcgcatcggatgccgcgctggtacgaatcacaatggatgaagagagatctttcgccagcaaaccgcgctcgcactgtttttccagcgtcgcgccaatatgcagcccccacttaccgctcaaaccttcctgcgataacgcacaatttagcttcgcggaatcgagaataaagcggatcgccgcaaacgggacttcattgacgaacttcaggatctcagccagcgtcgttctggaaagcaccgtcagcggagactcttgctcgccctctgccacacacgcctgctgggtaaacaccacaccatcgtgcgtctcgatatgcacaatgttggtatgcccgccgacgattgtgacacacgcccacttctcaccgttccagactttggctcgagagaagaggatttcatcgcaaggttcctggatcttaacggagactttccccgccgccagcagtgctttggcatcggcaattgcctgcgctgttgcgtctttcagcacttccagcccggcgttggcatttccacctaacgcccccagcgccgccgcaatcggcagccccaccattcccgtgccgggaacggtgacgcccagaccgttcttcatcagatttggcgaaacccaggcttctacacgttcaaccggaccttccagttctgccgcagcaaccgccgccgccagcgccagtgaaatcggttcagtacatcccagcgccggttttacttcctcctgaacggcgaggatgtaacgctgccataacggatttaaagtcgaatcaaacatattaaaaaccttaaaatttcaggtaaatcaagaaaatgccaggaacggagaaacacacagcaacaaaccagtgacgataatcaggtacagagacatccctttgtatttgtgcaatgctggtactttgtaaaccagccacgccgggatcaggcaccctaccatgccgaaaatcgggctacagatagaggtgaagctcaacaccggtgcgttcagtacgatggcgctccaggccagcaaaatggcgaaaatcatgatgccgcgctgaacgagattttcgttaatcttctcggcaggcatcttgcgacgcaggatgttcattacgatcccttgcgttgcttcgcgaaagcctaaatagacgccaaagaatgcagtcatgacagcaaagatattgagaatgacgctgaccactttcacccacgctgcgccgtcaccgctaataaactgtgcggcaatcgccagcgcggaaatattctgctcataggcttttaccgcttcgtcatgtcccatcgccagcgtgaacgacacggcgtagaaaaagacggtgacaaacaaaatgccaaacgcgatattcattgcccgcaatgctttatgccgcgccacttcaattgatttttcccgcgagcgataagagatcaccatcggacttaacgtctggataaacagaatcgacgtcagggtaaacggcagcgtaataatggcgtttttcaccagcagccccagcggcggtagcgaaccgacgttatacagatgccacattcccaccatcgacacgcccagcgccgcgaccaccagcagcttggtcagcaccatgccggtcgaaattttgaataacaatttctcgccgcgtgaggagatcgccaccagaatgcaaatcagtaccagaccataaaagggactgtctgacagcaacccttccgtcacgccgaaggtatgcaggtaggaagcactatcgttggtgatggcggtggaatagacgaacatccaaatcaccagcattacgaaatagagcgcacctaacaggatgccccagtttttacctaaataaccgctaatgacgctcgggtaatctttacattctggtgattctgccagcgtattaataaacaatcgctgaaacagatacattgccgggtaaccaatcaccgatgagagcaaaaatacccacaatcccatcaaaccgacctgcaccgggagaaaaacaatccccgcgccaatcgccatcccgatactcataatcacccagccggtgtcagtactgtcgaatttgatcgcttctcgccactcgctctcactcattccagcacgacccgccggggtcgaagcgtctgcaatgacgcctttattcgatgcaatttccataatttctcgctcaatattttgtagggcttattatttttttccgagccgcatcaaggcgatatgcggtctacgtttttgcaggcgagttattagaataaagaaatgatacgcgcgaggtcagagaaaatcttcacaatcaagactttgaaataacggagatggataagaattttctactaaattaatcgcaggagaatattcattctctatttgcggcagatcacaaaaaaaaggtgcacatttgtgcacccaaggatgaaagctgacagcaatgtcagccgcagaccactttaatggccagtcctccgcgtgatgtttcgcggtatttatcgttcatatctttgccggtttcatacatcgtctcgatcactttatcgagtgaaacacgcggtgccgaggtgcggcgcatcgccatccgcgcggcgtttactgctttcacggcattaatggcattacgttcaatgcacgggatttgtacctgtccggcaaccggatcgcaggtcagcccaaggttatgctccatcgcgatttccgccgcattgcatacctgcgccggactgccgcccagtagttcagttaaccctgccgccgccattgaacaggccacgccaatctccccctgacagccgacttccgcgccagagatggaggcgttcattttatacagcgcgccaatagcccccgcggccagaaaatagcgggcaattgaccgctcgtttaccggacgacggaacttatcgtaataagccagtactgccggaataatgccgcacgcaccgttagtcggtgccgttaccacgcgcccgccagctgcgttttcttcactaaccgccagcgcgtacatgttgatccagtcgatgacattcatcggatcgttagagatgttatcgctggaaaccagctgacgacgcagcgctacggcacggcgcggcacattgagcggaccaggcagcacgccttcagtgttcatcccacgttcaataccgtcatgcatcacttgccagatacgggcaaaaccggcgtcaatttccgctttgctgcgcagcgctagctcgttgtgcatcatcagaccagatatagacaggccgttgtaatcacacattttcagcagttcacctgctgagtggaaatcgtaaggtacggacgtttcgacatcgtgcgacaggccgaagtgttcttcttcgacaataaacccgccgccgacagagtaataggttttacttaatagctcttcctgtcccttccaggcagtgatccgcattccgttctcatggcgaggcaacatttcgggatggaagataatgttctttgctacaggaaaatcaacaatatgcgcaccagatgccactggcagccgcccgctgcgcgttactaactctataaatgcagggatctcatcaatgacaacatcctgcggactgtttcctgccagtcccatgatgatggcgacatccgtggcatggcctttgcccgtcagtgacaacgacccgtacagatcgaccacaatatggctcgtcgcggttaataagccgctactttccagccgatcaataaaactttttccggcattcattggccccacggtatgcgaactggagggaccaatcccaattttgaaaatatcgaatgcactaatcatatccacaccctcggattgccgttcagtgaagtggagcggaacgaccttacgaccgtcccgctcacgaggctttacgcactacgtactgcgatggcttcaatttccagcttcacatctttcggcaaacgcgcgacctgcacacagctccgggtcggataggtcgcctgatgctcatcgaagaactgcttatagacttcgttgatggtggcaaaatcattcagatcggtgataaacacggtcatcttgatgatatcgcccacgctcagcccggcagcaaccacgatcgctttgacgttttcgaggcttaaacgcgcctgatcttgcacatcagccgggatctcaccggtctgtgggcaaaccggtatttgcccggaggtgaagaccatgctgcctaaatcaacgccctgaacataagggccgattgcgcctggggcacgttgcgtttcgataatctttttcatacatcctccggcgtcagagcgcctgggtaaaggtacgtgaaataacatcctgttgctgttcacgggtcagtgcgttgaagcgcacggcgtagccagagacacggattgtcaggttaggatatttttccgggtgctcgatggcatccagcagcatttcccgattcattacgttgacgttgaggtgttgaccgccttcgacatccgcttcgtggtggaaatacccatccagcaggccgacaaggttggttttacgtactggatcttctttgcccagcgccgcaggaacgattgagaaggtgtacgagatcccatctttggcgtaggtgaacggcagtttcgccaccgacgtcaatgaggccacggcacctttgcggtcacgaccatgcatcgggttagcgcccggcgcgaacggtgttccggcgcgacgaccgtccggcgtattaccggttttctggccgtacaccacgttagaagtgatagtcagaatcgactgggtagggacggcgttgcgataggttggcagcgctttaattttcttcataaagcgttcaaccaggtcgcaggcaatgctgtctacgcgctcgtcgttgttgccgtactgcggatattcaccgtcgatttcaaagtccaccgccaggccgttttcgtcacggattggtttcacgcgggcatatttgatggcagacagggagtccgtcgccaccgacaggcccgcgatgccgcatgccatagtgcgatagacatcacgatcgtgcagcgccatcagcgaagcttcgtagctgtacttgtcgtgcatgtagtgaatgatattcagcgcgctgatgtactgcaccgccagccagtccatgaagtgatcgaggctgtccatcactttgtcgtaatccagcacgtcgtccatcagcggtgctgttttcggcccgacctgaatcttcagcttctcgtccaccccgccgttaattgcgtagagcagcgttttcgccaggttagcgcgtgcaccaaagaactgcatttgcttaccaatcaccattgggctgacgcagcaggcaatcgcgtaatcgtcgctgttgaagtcagtacgcatcagatcgtcattttcatactgcaaggaagaggtgacgatcgacacctgcgcggcatattttttgaaggcaatcggtaattcttccgaccaaagaatggtcaggttaggttccggtgccggccccatagtgtgcagggtgtgcaaatagcggaaggagtttttggtcaccagcgtacgaccgtccagccccatcccgccgatcacttccgtcgcccagattgggtcgccggagaacagcgaatcaaattccggtgtacgcaggaagcgtaccatacggatcttcatgatgaagtgatcgatcagttcctgtgcctgctgctcattgagtacgccagctttaaagtcgcgctcaatgtagatatcgaggaacgatgccgtgcggcccagcgacatcgcgccgccattttgcgatttcactgccgccagataagcgaagtagagccactgcaccgcttcctgcgcattctgcgccgggcgagagatatcaaagccatatttcgccgccatttcctgaatctgcaacagcgcatgacgatgctctgccagctcctcacgcagacggatggtggcttccagatcctcgcctttttccagacgagactggagatcggcaaattgcagttcgcgttcacgtaccagataactgatgccatacagcgctacgcggcgatagtcaccgataatgcgcccacggccatagccatctggtaaaccggtcagcacgccagatttacggcagcgcagcatatccggtgagtaaacatcaaatacgccctggttatgggttttacgcagatcggtaaacagatattcaaattcactgtccatttctcggccataggcgtggaatgaacttttaatcatattaatgccaccgaacgggtgtagcgcacgtttcaacggcgcatccgtttgcaggccaacaattttttccagcggctggttaatatatcccgcatcatgagcggtaattgtggtggcaatattggtatcgaaatcaaccggcgcgtgggttgcattttcgatacggatgccttccattactttttcccacaattccgtggtggcaggcgtcgcttcggcgaggaaagattcatcgccttcatacggtgtatagttatgttgaataaaatcgcggacattaatttcgtttttccagtccgtacctttaaagccaagccatgcgtcggcgtacagcttatcgctggtatcaatatctaccttcatgaaaaataatctctctacaatacttcaactaaattatgcaaattctgcgggcgcgttaactttgcctaaatgaatggcatccaaagcaatcattttttcttcgttagtcggaataacggcacaaatgacacgcgcattttcactggaaacaattcgctcaccacaggagttagagcgattattcatttctgtatcaatctctaagcctaatacagccaaatgttccatgaccagacgacgaattaagcttgaattctctcctattccgccggtgaatataattccatccaggcgacgtaatgaagctgcgtgtccggcaatatgacgggcaattcggtgaacaaaggttttaattgccagttgcgcgcgttcgtgaccttcatgccaggctttttccagaacacgtaaatccgaagaaagaccggaaatacctaataatcccgactctttattcactacgcgttccaggtcacccaggctctggttggtttggctggcgacccaggacatcgcaccaaagtcgacatcgccactgcgggtacccatcatcaagccttccagcggcgtcattcccattgaggtatcaacactctgaccgttgcgaaccgcgcagattgacgcgccattgccaagatgcgccacaaccaggccggagtcatcttccgccagattcagcagcgaatgtgcgcgctgggaaacatagcggtgcgacgtgccgtggaaaccataacggcgtacacctaactcttcataatatttccacggcaggccgtataaataagcttccggagccatcgtctggtggaaactggtatcaaataccgccacctgagttacgcccggaaataattgctgcgccgattcaataccacttaaattggcgtaattatgcaggggtgccagtggagaaacgcgacggatattatcaatgacttcatcggtaataatggcggactcggtaaaaatactgccgccgtgagcgatgcggtggccaattaaggccacactgtcatttaaattccgtttttccagttcaaatgcaattgccttcaatgcaccttcgtagctgtggtgagccagcggtgctggctctcccccatttacggataagaatgcattttccgagttaataccgtcggcaatacctgacattaatacttcacagtcgctggcatcgagcacggaaaacttaatcgaagacgaaccacagttaataaccaaaacaaccggaaattcattcatctcttttctcatcctgagttacggattaaaacagtttgtatacgatgttcaggatggtcagcagaccaatcacggtaacaaacacgttatccagacgaccacggtatttcgccagagacggcgctttacggatggcatacatcggcaacaggcacagcagggatgcgataatcggtgcgcccatggcttcaatcaggtcaaggatgttcgggttggcgtaggcaacaacccaggtggagcccatgatgaagatcatgctgatagtgttcagtttacccagcgacactttagttttgtcgcctttataaccaaacttcaggaccaggccattcagaccttccagcgttcccagatagtgaccgaagaaagatttgaagatagccacgagtgcgatgatggaagccgcatattccagtgtaatcgcgaacgttgttttggtaccggtcatggacgcaaagtggttagccagataagaaagcactggaatattctgcgctttggcttccgccatgttggccggagacagagtaaacaggcagctaaaggcaaagaacatcaccactgcaaccatcagcatgctggcacgagaaatgatttgggaacatttacgttcggtgaagtcgcgaccgaagtctttctcatactcttcacgcttagaaaccacgaaggaagagacgattggcgagaagttaaaggagaaaaccatgatggaaatccccagccagacagtgatcaggataccgtcatgaccggttaacgacagcgaaccgaggtcaacctggtcgataactgcagagttccagtaagggatcagcgacaaagaaatcagcaccaggctggcgataaacggccataccaggtagctcatcactttaaccatcagatccttaccaaaccagatgacgaaagccatcagcagcaacaggaacagcgccacaaagccgcgattcagcggtgcaaagccgagctggttttcccagaacgtcataaaggtattggtaatagtaacgccataaatccacagcagtgggcaaatcgcgaagaagtacaggaacgtgataaccacgccgccagttttaccaaaatgctcttccaccgtttccgtaatgttgccggaagggttagagccagaaagacacagacgcgccagcgcccggtggcaataaaacgcgatggggtatgccaataccaacatcagaagaatcgggatcagtccgccaaaacctgcgcggatagggaagaacagcaccccggcgccgattgccgtaccaaacaagcctaacgtccatgtggtatctgatttacgccaggacgattgttttgtctggctggatacaatgctatctgaagtactcatatcctatcctcaacgaattaattaagcgtcaacgaaaccggtgatttgagagacgcgagaaagatcgatattgccgccggaaataatactgacggtttttctgttttgaatatattggtctaatttaccgcttaataatgcagcacatgccagagcgcctgcgccttcggtgacgactttattgcgctgaattaaggcaatcatactgtttctgatttcgtcttcgctgaccagcacgatgtcatcgactaattcacgaacgatttcgtaagttaaattacccgggcgggagacatcacaaccatccgccagggtgccggtagttcggtgcgtggttatttctccggagtggaaagaagccgccatgccgtgaacgttttcagactgtacgccaataacacgaatggtcgggttaatagatttaattgccaccgcaataccagcaattaaaccgccaccaccaattggcacaatcacgttatcgacatcatagagatcttccataatttccagaccaatcgttccctggccagcaatcactttcggatcatcgtaaggtgggataaaaatacggccttccatttcgacaatttcgctcactttagcgatagtgtcgttgaagttatcaccatgcagaacgacttctgcggagtagtcgcacgttgccgctactttggattttggcgcaccttttggcatcaccactttaccgtcgatacccagcatcgcgcaggagagggaaaccccttgcgcatggttgcccgcagaacaggccaccacgcctttgcgtttttccgcatcggtcagtgaacttaatttattaaatgcgccacgaattttaaatgaacccgtacgctgcatattttcaaacttcaggaatatttcacctttgcaacgttcactaaaatagttggagcgaggcatgcctgttttataaattcgcccagccagtcgttgtttcgcttcaataatgtcatcaatagcaaccggcagatcgtatgtaatatgcattataaaacctcttcgcctgaattaaatatgtaggtaaccgtaaccgacacctgcaagacagacaggtggattatttatgtttaaataaaaacaaataactaaccaacttctattaattgccttcgtctacacccattataagatgaatactctttggctaattccaccaaaaccgatgctgcttttttaatacgataatttttcgaccataccgcggcatattgtgccacaggtaatgtttcttcaaccggaatagtaataaattgattagaaccaaaaggtgacgtcatatcacaaggaattacagttaagaaatcagcattgagaacaagattataaattgtcacgactgagtcggttttaacgatgttttcaatactgatgccatttctttgtaacgtagtaagcagttcgctgtagtaccccatattagtttgtggcaacacccactgttcgttcttcaacgactccagcgtggtggtgccggtgcatgttcgggacttactggctaccagcacaaactcggactcgaacagcggctcaacatgtaaatcctgaagcttcatttctgcacttaacgtaccaatcgcaaaatccagtcgaccgtcgcggattgccggtaagaacgaagacagttgcgcttcatacatagaaacctgcgctttcgggaacacctctttgaacttgttgatcatccctgacataaaagtaaaaccaatcaatgaaggaaaaccaaatgagacttccaccaccgcctcagaagacataccgcttatctcattaaccatatttttcatttcacgggtaatggattcggaacgggagagtaacaattgaccggcaggtgttaatgttacaccggtatttttccgcaccactaattccacaccaaaataatcttcaatatcgttaatgattttactgacggccggttgagttaaccctaattcttttgcagccgagccgatagaaccacttctaatgacttcctgaaagactaccaggtgctgcgttttcggaagaagaatagtgctcataacgacctacgttaattacctcattgacggcatgaagtgtatcaaaatgaaatgaacaggatatgtgcgaccactcacaaattaactttcaatactttccagagtatcgttattacaattaaatacctttaaatatcaacaagttaaagtataaaaatcagcataaaccctgatttttgtcaaaaaaaatgacggggataaccatattttatggcgataacatcattcgttatgtggttaatacaaaaaaggggctgagaccatatttcaagcaattaccggataattaccaggcaaaatttgagttaaatttaatgagcaagttctcaaattttattataaataaaccattttcagtgataaataatgcggcatgtcacattttttcacgctatttgttggagaacaaacatttattttatcaatattttaaaatttcgaatacatgtattgatcatctcgaacaattgattaacgtcaactttttctcttctgacaggacgtcattttgtgaatgcaatcgttttccataaattcttctcccctcataggcgacgaatagcattttgtgttgaggatcacaaaacgaataattgctgatcgccgcgataaggtcagacaaagacaacaagggaaattttcacagagcttttgatcggcgtaggccacagaatgttgcttcgtttactgtaacgccgggtaaatgagcgttttttgatagtgcgaaagaaccctgcgaggaaaataagcatctattattgtttgtcatgatgacaaggcaggcatcaatgaaaggcttcccaattgcgcatatttttcacccttcaatcccgccaatgcacgcagtggttaacaatcacaatagaaatattgattattggacggtaaaaagaaagtttgcagaaattgtctccaccaatgacgttaataaaatttacagtataagtaatgaactgcggagagtattatctgcaataactgcattgaatttctatcatggcgatgttccttctgtcatgatccgaatccaaccggaaaatatgagtccattcattatagatatttctacaggagaacatgatgattatatcatacaaacattagatgtaggcacttttgcaccttttggtgaacaatgtacttgctcagccgtcaataaaaaagagctggaatgtattaaggagacgatttctaagtattgtgcaaaattcacccgaaaagaagccatcttaaccccccttgtgcactttaataaaaccagcattacttcagattgttggcaaattctctttttttcacccgatcattttaataatgatttttattgattatttataaaggataaaataatgttccctgtttcatcaattggtaatgatattagtagtgatttagtccgtcgaaaaatgaatgaccttcctgaaagcccaacaggaaataacctcgaagcactagcaccaggtatagaaaaactaaaacagacctctattgaaatggtcactttacttaacacgttacaacctggtggaaaatgcattatcactggtgattttcaaaaagaattagcgtacttacaaaatgtaattctttataatgtctcgtctcttcgtctggattttttaggttataacgcccaaattattcaacgatcggacaatacttgtgaacttaccattaatgaaccgttaaaaaaccaggaaatatccacaggtaatatcaatattaattgcccattaaaagatatttacaatgaaatcaggaggttaaacgtaatttttagttgtgggactggagatatcgttgatctatcctctctggacttacgtaatgtcgatttagattattatgatttcacagataaacatatggctaatactattttaaatccttttaaattgaattcaacaaattttactaatgccaacatgtttcaggttaattttgttagttcaacacaaaacgccacaatctcctgggattatttactaaaaataacgcctgttttaataagcattagcgatatgtattctgaagaaaaaatcaagtttgtcgaaagttgtttaaatgagcctggagacattaccgaagaacaattaaaaattatgagatttgcaattataaaatctataccaagggcaactcttacagataaattagaaaatgaattaacaaaagaaatatataaaagctcatcgaaaatcatcaattgcttgaacagaattaaattaacagagatgaaagaattctcatcagaaaaaatatatgattacatcgatataatcattgaagattatgaaaataccaaagaaaatgcttatctggtcgtcccccaaattaattatactatggatttaaacatagaagactctagctcagaagagttactttcagataataccctcgagaaagacgaaaattctccggacaatggctttgaggtcggggaatataacacatatgaagcatataactcagagaagcaatattttaccagagaggactatacgtatgattacgaccttttaaatgcaatatagacttaataacttcttacaaagtctattattaataccgtagatatttattcatcttaccctgtgcaccaaaagcaaaaactcactgacgcgggtttgaaactgatggcaaccgcaaaaatgcctgatgcgctacgcttatcaggcctacgccatctctgcaatatattgaatttgcgtgcttttgtaggcaggataaggcgttcacgccgcatccggcatgaataaagcgcactcaacaatctgaaacccgccggaacggtttattacgtacatcaggtaaaactgaccgataagccgctttcttttgggtatagtgtcgtggacagtcattcatctttctgcccctccaaaagtaaaaacccgccgaagcgggtttttacgtaaaacaggtgaaactgaccgataagccgctttcttttgggtatagtgtcgtggacagtcattcatctttctgcccctccaaaagcaaaaacccgccgaagcgggtttttacgtaaaccaggtgaaactgaccgataagccgctttcttttgggtatagcgtcgtggacagtcattcatctttctgcccctccaaaagcaaaaacccgccgaagcgggtttttacgtaaatcaggtgaaactgaccgataagccgggttctgtcgtggacagtcattcatctaggccagcaatcgctcactggctcaagcagcctacccgggttcagtacgggccgtaccttatgaacccctatttggccttgctccgggtggagtttaccgtgccacggactgttaccagccgcgcggtgcgctcttaccgcaccctttcacccttacctgatcccgcttgcgcgggccatcggcggtttgctctctgttgcactggtcgtgggtttcccccccaggcgttacctggcaccctgccctatggagcccggactttcctcccctccgcccgtctcccccgaagaggacgacgacgaagcggcgactgtctggtcagcttcggcgcgcagtatagagggtttgcgcgcccttgtcaccccgcgttgcgcattccaatcgccagtgtcgcggcgatattacgtgaagcacggcagatattgtcataagccccgcggaatgcttcgtccaacgtacctatgctggtcaatacgctgaagaccgcatcaatgccatgctgatgtacaacgccaacatcatcggtcaggctacccgcaatgccaatcaccggtttatggtacttcttcgccacgtttgcgacaccaatcggtaccttcccgtgaatactctggctgtcaatacgcccttcaccggtgatcaccagcgtacaatcgtgaatatgttcctccagattcagcgccgtagtgacgatttcaataccacttttcagttccgcaccaagaaacgccattagcgccgcgcccataccacccgcagctcctgcaccggggacatctttcacatcaacatgcagcgcttttttaatgacctcggcatagtgagagaggttattgtccagctcaacaatcatcgcttcactggctcccttttgtgggccaaagatgcgcgatgcgccgttatcgcccaccagcggattggtgacatcacaagcgacgcgaatgacgcaatcttttaagcgcggatcgaggccggaaatatcaatatcattcagagtattaagactaccgccgccaaaaccaatttcattgccgttggcgtcgcataatttcgcccccagcgcctgtaccatgcctgcgccgccatcatttgtagcgctgccgccaatgccgataataatgtttgtcgcaccgctctccagcgcctgcaggattaactcgcctgtgccgcgtgaagtggtcacgagtggatcgcgtttttccgcaggtaccagctccagcccactggccgccgccatttcaataaacgcggttttgccatcgccggagatcccccaactggcattcactttctcgcccagcggccctgtaacccaggcgtgacgttcagccccctgggtggctgcaatcatcgcttccaccgttccttcgccaccgtcggcaaccggaacagaaacgtactgtgcatcaggaaaaatttcccgaaatcctttttctatcgcctgcgcaacctcgctggcagataaactttctttataagagtctggggcgattacgattttcatacctatgcctgttaccacatgacgccggagggcgtttctcttattcggcctggattccaggcccggattgcaatacgccatccgggcacgacgtcattaacgagtaacttcgactttcgccagtttttcgtagtagcacgccagggcgctatgatccgccgttcctaaaccatctgctcgcagtgcctgcatcatctccataaccgcagctgtgagcggcagttgtgcgccgacgccgtgagaagtatccagcgcattcgccagatccttaatatgcagatcaatacggaagcccggcttgaagttgcggtccatcaccatcggcgctttggcatccagcacggtactgcccgccagtccaccgcgaattgcctgataaaccaggtccgggttaacgcccgctttagttgccagcgttaacgcttctgacatcgcggcaatattcagcgccacaatgacctgatttgccagtttggtgacgttacctgcaccgatttccccggtatgcaccacggaacccgccatcgctttcatcaaatcatagtatttgtcgaaaatagccttgtcgccgcccaccatcactgacagcgtaccgtcgatggctttcggttcaccgccgctcaccggagcatccagcatatcaatgcctttcgctttcagcgcttcgctgatttcacggcttgccagcggtgcgatagaactcatatcgatcaataccgtacctggcttcgcgccttcaataatgccattctcacccagcgccacctctttcacatgaggggagtttggcagcatggttatgatgacgtcgcactgttcagcgatcgctttagccgtagacgctgtttctgcacctgcagcaatcacgtcagcaatagcttctgggttacggtcagcaaccaccagcgagtaacctgctttcagaaggtttttactcattggtttacccataatccccaggccaataaaaccaactttcatagtcatatcaatcatctctcttgttgcggtggtggttattttttaaaggtatcagccagtttctgagtggcagagcggaagacgccgagatcgctgccgacagccacaaacgtcgcgccccattccagataacgacgcgcatcggcttcgaccggcgcgaggataccgctgggtttgccgtgcgcgctggcacggttaaaaatgtgctgaattgctttttgtacatccgggtgtgatgcattgccgagatggcctaatgccgcggccagatcgctggggccgacgaagatgccgtctacgccttcggtagcggcaatggcatcgacgttatctacgccctgctgactttctatctggaccagaatagtgatgttcttgttcgactgagcgaaataatccgccacggtgccaaacatattggcgcggtgagaaacggagacgccgcgaatgccttccggtgggtaacgggttgatgccaccgccagctctgcttcctcttttgtttctacaaaaggaatcaggaagttatagaaaccgatatccagaagacgcttaataattaccggctcgttggtcggcactcgcactactggcgcgctggcgctgcctttcaaggccattaactgcggaataaacgtggagatatcgtttggcgcatgttcgccatccagcaccagccagtcaaacccagccaaaccaagaacttcagtgctaatcgggttagagagtgctgaccagcaaccaatttgtacctgtttcgcagccagtgcggctttgaatttattcgggaaaacatcgttattcatcgcttatacctttgcttatttctgcaattccatacgtttaatgtcgccaactacgaagaggtagcagaccatcgccatcagcgctgaacatcccacgaaaaccagtgctgcattgaaggagtgcagttcacttaccaggtagccaatcaccagtggagtgacaatggaggcaacattgccaaagacgttaaagacgccgccgcagaggccaacaatctctttcggcgcggtgtcagaaatcaccggccagcccagcgcaccaaatcctttgccaaagaaagccagcgccatcagcatgaccaccagcgtggtgttgttggtgtagttacataagatgatggtggaagccagcaacattcccagcacaatcggtagcttacgtgccagggtcagggataaaccgcgtttgatcagataatccgagaagacacctcccagcacgccgcccgcaaaaccacacagtgctggaatcgaggcgaccagacccactttcagaatcgacatgcctttttcctgcaccagataaatcgggaaccaggtgaggaagaaccaggtgatggtgttgataaaatattgtccgaaaaatacgcccagcatcatgcggttagagagcaattgcttgatgtaatgcagtttgggtccgcttgctgccgcactgcccggctttttgtggtccatatcgaccaccgcgccattttcagagataaacttcagctcttccgcagacatacgtgggtgatctgtcgggttatgaatcaacttgatccacagcgccgtcagcacaaaaccaatcacccccataacggtaaagacgtgctcccagccccaggcgaaagtcagccagccaagcagcggcgaaaagagcgccagcgagaaatattgcgccgagttaaagatggcggaggcagtaccacgttctttcgtcgggaaccaggcggcgacaattcgggcgttcgccgggaatgatggcgcttccgagaagccgagcataaagcgcataaagaacatggagatccctgcccaggccagcgggaacatatcaacaaagccttgcaggaaggtgaatagcgaccagaaaaagaggctgtaggtgtaaacttttttcgagccaaacttatcaagcagccagccgccggggatttgcatcagcaagtaggcccagccaaaagcggagaagatgtaacccatcgaaaccgcacttaactgcaactcttttgccacttcggtaccagcaatagacagcgttgcacgatcggcgtagttaacggcggtaacaataaaaataatcagtaatattaaatagcgggtatgcacgcctttctttttttcgtcaacggtgtccagaatcattttatttacctcgggtacttatgctgatttttattattatggggaaggtgttatttatgagtttcatttatgccgtaacgacaatgaactcgggaattagtataagcagcgcgagaataataatcattgtgcaaatgctaatttaattaatactatttaaatattattttgagcatatgcacataaggttgcgcgctaaagcacagatttgcgctttaccttaccgggcggcactgcaatccctgaaatgattgacattgatcacatttctgcgtttaaactcctgacattcttatttcacccaatgaagtcatttatttttaaatgagaccaggtcctcattttaataacccctggctggagaatattgcacaatggccaacatcgaaatcagacaagaaacgccaactgcgttttatataaaagttcacgacacagataatgtggcaattattgttaatgataatggcctgaaagcaggaacgcgttttccggatgggctggaattaattgaacatattccccaggggcataaagtcgcattgctggacattccggctaatggtgaaattattcgttatggcgaagtgattggttacgccgtgcgtgcaatcccacgcggaagctggatcgacgaatcaatggttgtactaccggaagcgccgccgttacacacgctgccactggcaaccaaagtcccggaacccttaccgccgctggaaggatacacctttgagggctatcgcaatgccgatggcagcgtgggcaccaaaaacctgctcggtatcaccaccagcgtccactgtgtggcaggcgtggtggactatgtagtaaaaatcattgaacgcgatctgctaccgaaatacccgaacgtcgatggcgtggtggggctgaatcatttgtacggttgtggcgtggcgattaacgcaccggcggcagttgtacctatccgtaccattcacaatatttcgctgaatcctaactttggcggcgaagtaatggtgattggcctgggttgtgaaaagttgcagcctgagcgcctgctgactggaacggatgatgtgcaagctattccagtagaaagcgccagcattgtcagtttgcaggatgaaaagcatgtcggttttcagtccatggtcgaggatattttgcagatcgccgaacgccatctacaaaaactgaatcaacggcagcgagaaacctgcccggcttcagaactggtcgttggtatgcagtgcggtggcagcgatgcgttttctggtgtaacggcaaacccggcggttggctatgcgtctgatctactggtgcgctgcggcgcaacggtgatgttttcagaagtaacggaagtgcgtgacgcgatccatctgctgacaccacgcgcagtgaacgaagaggtcggcaaacggctgctggaggagatggagtggtacgataactatctcaatatgggaaaaaccgaccgcagcgccaacccttcgccgggcaacaagaaaggcggtctggcaaacgtggtagagaaggcactcggctccattgctaaatcgggtaaaagcgcaattgttgaagtgctgtcgcccggtcaacgcccgactaaacgcggattaatttacgccgcgacgccagccagcgattttgtctgtggcacgcaacaggtggcttcgggtatcacagtgcaagtgtttacgaccggtcgtggtacgccgtacggcctgatggcggtacccgtcattaaaatggcaacccgcaccgagctggcgaaccgctggtttgatttaatggatattaatgcgggcaccatcgctaccggcgaagaaactattgaagaggtgggctggaagttgttccactttattctcgacgtcgccagcgggaagaagaaaaccttctcggatcaatgggggctgcataaccagctggcggtgtttaacccggcaccggtgacctgatttcttttggaacgtccctcgcaaaacatggccttagtgccatgtttttattgtttaaagcccccacgtccattaataatgcatttgcattaccttagttcaagcttataatttgagcagaaaacaggctgtaaaaggacagtgaatcatgcccgctaatgctcgctctcacgctgtactgaccactgaatcaaaggtcacgatacgcggacaaacaactatccccgcgccagtgcgtgaggccttaaaactgaagccaggccaggacagcattcattacgaaattctgcctggtgggcaagtatttatgtgccgactgggagatgaacaggaggatcatactatgaatgcatttttgcgttttctggatgcagatatccagaacaacccgcaaaaaactcgtccattcaacattcaacaaggaaagaaacttgtcgctggcatggacgtcaacattgatgatgagattggcgacgacgaataatggattttccacaaagggttaatggttgggcgctatatgctcatccctgttttcaggaaacctacgacgctttagttgccgaagtcgagacattaaagggaaaagatcctgaaaattatcagagaaaagccgccacaaagttattggcggtagtccataaagtgattgaggagcatatcacggtcaatccatcatcaccggcattccgtcatggcaagtcgttaggctctgggaaaaataaagactggtcacgggtaaaatttggtgctggtcgttatcgtctcttctttcgttatagtgaaaaagagaaagtcatcattctgggatggatgaacgatgaaaacactctgcgcacctacggtaaaaaaacagatgcctataccgtattcagcaaaatgttaaaaagaggacatcctcctgccgactgggaaaccctcacccgagaaacagaagaaacccattgatggtgttcacaatgcccgccgaacgcattcgtgttgaccagcgggcatcctttctcactccccgaccagaatcacttcaaccccagcctttcgcagtccttccaggctatccgcaggaatgccttcatcaacaatgatcatgtcgatacgttgagtatcaatgatcttatgtaaactggaacgattgaacttactggaatcggtgaccacgatgatccgttccgcaacttcgcacatccgacggtttaaacgagcttcatcttcattatgtgtgctgacgccgcgctccagatcgatcgcatctacaccaagaaacagcatatcgaagtggtaattttgcagcgattgctcagcctgatcgccgtaaaaagattgcgactgacggcgcaaatgcccgccggtcatcagcagctcaacgccttccgcttccagcaacgcattagccacgttcataccgttggtcatcgcaattacgtcagtgtgcttgcgcatcagacgagcaatctcaaaagtggtggtcccggaatcgaggataacccgatgacctggctgaatcaactcaacggcagctttcgcaacgctgcgtttcatcgcggtgttcagtgcgcttttatcttccactgatggctcgactgacggcgtcgtgctatcgcagatcaacgcgccaccataggcacgcacagcgatcccctgcttttccagaaacgccagatcgttgcggatcgtcacagtagatacgccatacaatgccgacagatcgttaacctgcacactcccttgctgtcgcagacgctgaatgatctgttctcgtcgctcgctggtgccagtcactcgcttctcacctgaagcgtcggtattactcatagtaagtcctttcgtaaaactttcgtttcatttcgttttgcctattaacgcctttctattaagcaaatgcaagcccaccttgcccattgacgcaagctactctcgtttcagtgactttcattatgtttcttttgtgaatcagatcagaaaaccattatctttcgttttatttttatctcaccatgacgcagtatcaactgaaacaaaacgaaagattaatatcgcagtaatctgaactggagaggaaagtgaaacatctgacagaaatggtgagacagcacaaagcgggcaaaacaaatggaatttatgccgtttgttccgcacatccgctggtgctggaagctgcaatccgctacgccagtgcaaaccaaacgccgttactgattgaagcaacctccaatcaggtagaccagttcggcggttataccggaatgacgcccgccgattttcgcggctttgtttgtcagctcgccgactcgttgaatttcccgcaggatgcgttgattctgggtggtgaccatctggggccaaaccgctggcaaaacctgccggccgctcaggcaatggccaatgccgatgatttgattaaaagctacgttgcggcaggattcaaaaaaatccaccttgattgcagcatgtcctgtcaggacgatccgattcccttaactgatgacatcgtggctgaacgcgccgcccgtctggcgaaagtggcggaagaaacctgtcttgaacactttggcgaagccgatctggagtatgtcattggtaccgaagtgccggtacctggcggcgcgcatgaaaccttaagcgagctggcggtcaccacgccggatgccgcccgcgccacgctggaagcccatcgtcacgcctttgaaaagcaaggtttgaatgccatctggccacgcatcattgccctggtggttcaacccggcgtcgaattcgatcacaccaacgttattgattatcagcccgccaaagcgagcgccttaagccagatggtcgaaaactacgaaacgctgattttcgaagcgcactctaccgattatcaaacgccgcaatcgctgcgccagctggtgattgaccactttgccattctgaaagttggcccagcgctgaccttcgccctgcgtgaagctctgttctctctggcggcgattgaagaagaactggtgccagcgaaagcctgttctggtctgcgtcaggtgctggaagacgtgatgctcgaccgcccggaatactggcaaagccactaccacggtgacggcaacgcgcgtcgtctggcgcgtggttatagctactcggatcgcgtgcgctattactggccggacagccagattgatgacgctttcgctcatctggtacgtaatctggcggattcaccaattccgctgccgctgatcagccagtatctgccgctgcagtacgtgaaagttcgctccggcgagctgcagccaacgccacgggaactcattatcaaccatattcaggacatcctggcgcagtaccacacagcctgtgaaggccaataagcaaaacaaagaggaacacgctatgccaaatattgttttaagccggattgatgaacgcttgattcacggtcaggtcggcgttcaatgggtcggatttgcgggggcaaatctggtgctggtagccaacgatgaggttgccgaagatccggtacaacaaaacctgatggaaatggtactggcagaagggatcgccgtacgtttctggacgctgcaaaaagttatcgacaacattcatcgcgccgccgatcgacagaaaatcctgctggtttgtaaaacacccgccgatttcctgacgctggtgaaaggtggcgttccggtgaatcgcattaacgttggcaatatgcactacgccaatggcaaacaacaaatcgccaaaacggtttctgtggatgcgggcgatatcgcagcatttaacgacctgaaaaccgctggggtggaatgcttcgttcagggcgtcccgacagagcctgctgtggacctctttaaattactttgagggattcatcatggaaatcagcctgttgcaggcatttgcgttgggcattatcgcctttatcgctggcctggatatgtttaacggcctaacccatatgcaccgcccggtggtcctcggcccgttggtcgggctggtacttggcgatctgcataccggaattttaaccggcggtacgctggaactggtgtggatggggctggccccgctggcgggcgcacagccgcctaacgtgattatcggtactatcgtcggcacggcgtttgccattactactggcgtgaaacccgatgtcgcagtaggtgtcgccgtacctttcgctgtcgcagtacagatggggattaccttcctgttctcggtgatgtccggcgtgatgtctcgctgcgacctggcaacaaacccgcgccgcatttgatgctggtgccgacggcctggtgcattgctataacgggatgacaggtttacatcaccgcgaaccgggaatggttggcgcgggattaacggacaagcgcgcctggctggaactgatagccgatggtcatcatgtgcatccggcggcaatgtcgctgtgttgttgctgtgcgaaagagagaatcgtactgatcaccgacgcgatgcaggcagctgggatgccggatggtcgctatacgttatgtggtgaagaagtgcagatgcacggtggcgttgtccgtaccgcgtctggtgggctggcgggcagtacgctgtctgttgatgcggcagtgcgcaatatggtcgagttgacgggcgtaacgcctgcggaagccatccatatggcgtcgctgcatccggcgcgaatgctgggtgttgatggtgttctgggatcgcttaaaccgggcaaacgcgccagcgtcgttgcgctggatagcgggctacatgtgcaacaaatctggattcagggtcaattagcttcgttttgatagtttgctcctttattgggccttcacttcccccgtaaggcctttctttttctttcgttttgatctgtgcagcggtgtcggatgcgacgctaacgcgtcttatccgacctacagttggtgaccgcaaggccggataaagcgtttgcgccgcatccagcaatcccttttgcttcctttatcttttctttcaacgatcacaaatttcgttttatttcttttttctccattgaactttcagtttcttttctatagattttaatcaacgaaagacatcaccaagtgaaatgaaacgaaaggcaagtgaaagcgacaacgcccgacgtcaagttcatcagactaaggattgagttatgccagaaaattacacccctgctgccgccgcaaccggtacatggactgaagaagagatccgccatcagcctcgcgcatggatccgttcactcaccaacatcgacgcgctacgttccgcgctcaataacttccttgaaccgttactgcgcaaagagaatctgcggatcatcctgaccggagccggaacgtcggcatttatcggtgacatcatcgcgccgtggctcgccagccataccggtaaaaacttcagcgccgtaccgaccaccgatctggtcaccaatccgatggactacctgaacccagctcatccgctgctgttgatctccttcggtcgatccggcaacagcccggaaagcgtcgcagccgtggaactggcaaatcaatttgtaccggaatgctatcacctgccgatcacctgcaacgaagcgggcgctctttaccaaaacgcgatcaacagcgataacgcgtttgccctgctgatgcccgcagaaacgcacgatcgcggctttgcgatgaccagcagcattaccaccatgatggccagctgcctcgcggttttcgcacctgagacgatcaacagccaaaccttccgcgacgtggcggatcgttgccaggcgatcctgacctcactgggcgatttcagcgaaggtgtgtttggttacgcaccgtggaaacggatcgtttatctcggtagcggtggcttacagggcgcagcacgcgagtcggcgctgaaagtgctggaactgacggcgggtaaactggcggccttttatgattctccaaccggattccgtcatggaccaaaatcgctggtcgatgacgaaacgctggtggtggtatttgtctccagccacccttacacccgtcagtatgatcttgatctgctggctgaacttcgccgtgacaaccaggcaatgcgtgtaatcgccatcgccgcggaaagcagcgacatcgtcgctgccggtccacatatcatcctgccaccgtcacgtcactttatcgacgttgagcaggcattttgcttcctgatgtacgcccagacgtttgcactgatgcagtcgctgcacatgggcaatacgccggataccccatcagccagtggcaccgttaaccgcgtggtgcaaggcgtaatcattcatccgtggcaggcataagaggatcgcattatgagcattatctccactaaatatctgttacaggacgcccaggccaatggctacgcggtgcctgcttttaacattcataacgccgagacgatccaagcgatcctcgaagtgtgcagtgaaatgcgatcgccggtgatcctcgccggaacgccggggacctttaaacacatcgcgctggaagagatctacgccctgtgtagcgcctattccacaacctacaacatgccactggcgctgcatctcgaccaccacgaatcgctggatgatattcgccgtaaagtccacgcaggtgtgcgcagtgcgatgatcgacggcagccacttcccgtttgccgagaacgtgaagctggtgaaatcggttgttgacttctgccactcacaagattgcagcgtggaagcagaactgggccgcctgggcggtgttgaagatgacatgagcgttgacgccgaaagtgcattcctgaccgatccacaagaagctaaacgctttgtcgaactgactggcgtcgacagcctggcggtagcgattggtacggcgcacggcttatacagcaaaacgccgaagattgatttccagcggctggcggaaattcgtgaagtggtggatgttcctctggtgctgcatggtgccagcgatgttccggatgaatttgtccgtcgcactattgaacttggcgtcacaaaagtgaacgttgccacagaattaaaaatagccttcgctggcgcggttaaagcctggtttgcggaaaatccgcagggtaatgatcctcgttattatatgcgcgtcggaatggatgcgatgaaagaagttgtcagaaataaaattaatgtctgtggttcagcgaatcgaatttcagcataatcattagttttttatgatttatcccaatgtacttcccgattaatatcggggagtgccttaatggaaaaggagataactaaaccttaataaatacatcactacaatatcgcaacaataatatatttaaaaaaattatattattcaactttatggtgaggattacacaatgaccagtccaaatattctcttaacccgtattgataaccgtctggttcacggtcaggttggcgtgacctggacatccaccatcggtgcaaatctgctggtagtcgtggatgatgttgtcgctaacgatgatattcaacagaaattaatgggtattaccgcggaaacctacggctttggcattcgtttctttactatcgaaaaaaccattaacgtcatcggcaaagctgcaccacatcagaagatcttcctgatttgccgtacgccacaaacggtacgtaaattggtagaaggtggtattgacctgaaagatgtcaacgtcggcaatatgcatttctcggaagggaaaaagcaaatcagcagtaaagtttatgtcgatgaccaggatctcacggacttacgttttattaaacaacgtggcgtgaatgttttcattcaggacgtccctggcgatcaaaaagaacaaatccctgactaaatctaaaatcgccttaatattggtttgaggtaataaaaatgcatgaaataaccctacttcagggattatccctggcggcgttagtttttgttctggggattgatttttggctggaagccttatttttattccgcccgataatcgtttgtaccctaactggcgctattctcggtgatattcagactggcttaattaccggtggtctgacagagttggctttcgccggattaacccctgcaggtggtgttcagccgcccaacccgattatggcgggtctgatgaccaccgtcattgcatggtctacgggcgttgatgccaaaacagcaattggtcttggcctgccgtttagtttgttaatgcagtacgtcattctgttcttctattccgctttctcattatttatgaccaaagccgataaatgcgcgaaagaggcggatacggcagcgttttcccggcttaactggacaacgatgctcatcgtcgcttcagcgtatgcggtgattgctttcctctgtacttacctggcacagggggcgatgcaggcgctggtgaaagcgatgcccgcctggctgacccacggctttgaagtggctggcggtattctgcctgccgttggttttggcttgctgctgcgcgtaatgttcaaagcgcaatatatcccttacctgatcgccggtttcctgtttgtttgctacatccaggtcagcaacctgttgccggttgccgtactgggcgcaggctttgcggtgtatgagtttttcaatgcgaaatcccggcagcaagcgcaaccgcagcccgttgccagtaaaaatgaagaagaggactacagcaatgggatctgaaatcagtaaaaaagatatcacccgtctgggctttcgttcgtcgctgctgcaagcgagctttaactacgaaaggatgcaggcgggcggttttacctgggcgatgttgccgatcctgaaaaagatttataaggacgacaaaccgggcttaagcgcggcgatgaaagataacctcgaatttattaatacccacccgaatctggtcggattcctgatggggttattaatttcgatggaagaaaaaggagaaaaccgcgacaccattaaaggcctcaaagtggcactgtttggcccaatcgccgggattggcgatgcgattttctggtttactttgttgccgattatggcgggaatttgctcatcatttgccagccagggaaacctgctggggccgattctatttttcgccgtttacctgcttatctttttcctgcgcgtcggctggacccacgtcggttattcagtcggcgtgaaggcgatcgataaagtgcgagagaactcgcagatgattgcccgttcggcaaccatcctcgggatcacggtaatcggcgggctgatcgcttcgtatgtgcatattaacgtggtgacatcgtttgccatcgacaatacccacagcgttgcgctgcagcaggatttcttcgataaagtcttcccgaacattttaccgatggcctacaccctgctgatgtattacttcctgcgggtgaaaaaagcgcatccggtgctgttaatcggcgtgacttttgtgctctctattgtttgttccgcattcggcattttgtaaatggaacgaggcactgcgtctggtggtgcctctttacttaaggaatttcatcctgtgcaaacccttcagcaagttgaaaactatacggcgttaagtgaacgtgccagcgaatatttattggccgtgatccgtagcaaaccgaatgccgtgatttgcctggcgaccggagccacgccattactgacgtatcattatctggtagaaaaaatccaccagcagcaggttgatgtcagccagctcaccttcgtgaagctcgacgaatgggtggatctgccattaacgatgccaggcacctgcgaaactttcctgcaacagcatatcgtgcagccgctggggctacgtgaagaccagctcatcagctttcgctccgaagagataaatgagacagagtgcgaacgggtaacgaacctgattgcgcgcaaaggcggtctggatttatgcgttctcggattggggaaaaacggtcatcttgggctgaacgaaccgggagaaagcctgcaaccggcctgccatatcagtcaacttgatgccagaacacagcaacatgagatgttaaaaaccgcgggtcgccccgtgactcgtgggatcaccttaggcctgaaggatattctcaatgcccgcgaagttttgttactggtgactggcgaaggaaagcaggatgcgacagatcgttttctcacggctaaagtctctaccgctatcccggcttcatttttatggctgcacagtaactttatttgtttaattaacacctaaccagatgaaaaatttgctcaaaatgtttaaattaacttatgtaacagtcacgcattatattaaataacatttgactgggttgaacataacgccgatagcaaaaggagttatgttcaacaatttaattttagatatacatataacttgttctattaataaatcacctcgtattctgactcgccccctggcgcagcaaagtcaggcatttatactcttttgaatacatagaaaattgatatcaatataatgaaaatatcaaatatttgcatataaatataatcttaaagttcagtctatttaatgttcaatgaaatatttctgcctgtataatctttaaagatgttgaacatatattcacattaaatatgattatgtacttgttacaaggataaggttatatatgaataaagttacaaaaacagctattgcgggcttacttgcgcttttcgcaggtaatgccgctgcaaccgatggtgaaatagtttttgatggcgagattttaaaatccgcttgtgaaatcaatgactctgataagaaaattgaagttgctcttggtcactataatgccgaacagtttcgtaatattggcgagcgtagcccaaaaattccattcactattcctttagttaactgcccaatgactgggtgggagcacgataacggcaacgttgaagcgtctttccgtctatggctggaaacgcgagataatggcaccgtccctaacttccctaatctggcaaaagtaggctcttttgctggcatagcggcaacaggtgtgggtatccgtattgacgatgcggaaagcggaaacattatgccactgaatgctatgggcaatgataacacggtttatcagatcccggcggaatccaatggtattgtcaatgttgacctcatcgcttactacgtatcaaccgtagttccatcagaaatcaccccaggggaagcagacgctatcgttaacgtaacgctggattaccgttaatacgttagggcgttatctgacctgtcagataacgcccttttccttcctctttctcgttgtatcaggttgaaaaataactatgtcaaaacgaacattcgcggtgatattaaccttgttgtgtagcttctgtattggccaggcgcttgcaggaggaatcgttttacagcgaacgcgagtgatctatgatgccagccgcaaagaggctgcgttacctgtcgcaaacaaaggcgcagaaacgccttatttactgcaatcatgggtagataatatagatggtaaaagccgtgccccatttattataaccccaccgctatttcgtcttgaggctggcgatgactcatcactgcgaattattaaaacagctgataacctgcctgaaaataaagagtcgctgttctacattaatgttcgtgccattccagcaaagaaaaaatcagatgatgttaatgctaacgagttgacgctggtatttaaaacacggatcaaaatgttttatcgccccgcacacctgaagggacgggtaaacgatgcgtggaaatcactggaatttaaacgtagtgaccattcactcaatatatataacccaactgaatattacgtcgtatttgccggactggcagtcgataaaaccgatctcacaagcaaaattgaatatatcgcgcccggagaacataaacagttaccacttcctgcatctggcggaaagaacgtgaaatgggctgcgatcaatgattatggcggcagttccgggacagaaactcgtccactgcaataaaaaatataaaaacacaggtcatcagggaatgccacaacgacaccaccagggacataaacgcacaccgaaacagttggcgctcatcatcaaacgttgtttgccgatggtgctcactggcagcggcatgctttgcactaccgctaacgccgaagagtattatttcgaccccattatgctggaaaccacaaaaagtggtatgcaaacaaccgatctgtcgcgtttttcaaaaaaatatgcacaactaccaggaacttatcaggttgatatctggctgaataaaaagaaggtttcacagaaaaaaattacatttaccgccaatgcagagcaacttctgcagccacagtttacggtagaacaactacgtgagctgggtattaaggtggatgaaatcccggcgctggctgaaaaagatgacgatagcgtgatcaactcgcttgaacaaatcattcccggtacagctgctgaatttgatttcaatcatcagcaacttaatttgagcattccccaaattgcactgtaccgtgatgcaagaggttacgtctccccttctcgttgggacgatggtataccaacgctgtttaccaactactcgtttacaggttctgataaccgttaccgccagggcaatcgtagccaacgacagtacctgaatatgcaaaatggtgctaattttggcccctggcgattacgcaactattccacatggacacgcaacgatcagacatcaagctggaataccatcagtagttatttacaacgtgatatcaaggcgttgaagtctcagttgcttctgggagaaagcgccaccagcggcagtattttttccagctacacctttactggcgtgcaactcgcttccgacgataatatgttgccaaacagccagcgcggatttgccccaacggtacgcggtatcgcaaacagtagtgcaatcgtgactatcaggcaaaatggttatgtgatctatcaaagcaacgtgtcagcgggtgcctttgaaattaacgatctctacccctcttccaacagcggcgatttagaagtcacgattgaagaaagtgacggtacacaacgtcgctttatccagccttattcttcattacccatgatgcagcgacctgggcatctaaagtatagcgcgaccgctggacgctatcgcgctgatgcaaacagtgatagcaaggaacccgaatttgctgaagccacggcaatatatggtttgaataatacttttacgctgtatggcggcctgctcggttctgaagattattatgcgctggggatcggtatcggcggcacacttggcgcactgggcgcgttgtcgatggatatcaacagagctgacacccaattcgataaccagcactcttttcatggctatcaatggcgtacgcagtacatcaaagatatcccggaaaccaacaccaatatcgctgtcagctactatcgctataccaacgatggctattttagttttaatgaagccaatacccgcaattgggactataacagtcgccaaaaaagtgaaattcaattcaacatcagccagacaatatttgatggggtaagtctgtatgcctccggttcgcagcaagactattggggcaataacgataaaaacaggaatatctctgttggggtttccggccagcaatggggagttggttacagcctgaattatcaatacagccgctacactgatcaaaataatgaccgcgcactctctttgaatctcagtattccgttagaacgctggttaccgcgtagccgggtttcctatcagatgaccagccagaaagatcgcccaacccaacatgaaatgcgtcttgatggctcactgctggatgatggtcgcctgagctatagcctggaacaaagtctggatgacgataacaaccataacagtagcctgaacgccagttaccgttcaccttatggcaccttcagtgccggatacagctacggtaatgacagcagccaatacaattacggcgttaccggcggcgtggttatccatcctcatggcgtgacgctctcgcaatatctgggcaacgcttttgcgcttatcgatgctaacggagcatctggcgtgaggatacaaaactatccggggattgctaccgatccttttggctatgcagtggttccttatctcacaacttatcaggaaaaccgtctctcggtagatactacgcagctgcccgataacgtcgatcttgaacaaacaacacagtttgtggtgcccaacagaggtgcaatggtagcggcgcgtttcaacgccaatatcggttatcgcgtacttgttacagtcagcgatcgcaacggtaaaccgttgccctttggcgctcttgccagcaacgatgatacggggcaacaaagtatcgtcgatgagggcggcatactatatctctctgggatatcgagtaaatcacaaagctggactgtacgctggggaaatcaggcagatcaacaatgtcagtttgctttcagtacaccggattcagaacctacaacctctgtattacaaggcacagcgcagtgccattaaggataaaaaaatgaaaagagcgcctcttataacaggtcttttgttgatatccacatcctgcgcttatgcctcctcaggagggtgtggagccgacagcactagcggtgcgacaaattacagcagtgtggttgatgatgttacggtgaaccagacagataacgtgacaggacgggagtttacctctgcaacgctaagtagcactaactggcaatacgcctgttcctgctctgcgggtaaggcagttaaacttgtctatatggtcagccccgtacttaccaccactggacatcagacaggatattacaaactcaatgacagcctggatattaaaaccacattacaggcaaacgacattccaggactcacaaccgaccaggttgtctctgttaacacccgattcacacagataaaaaacaacacggtatattctgctgcaacccaaacgggtgtttgccagggtgatacgtctcgttatggacccgttaatattggtgcgaacaccacctttaccctgtatgtcaccaagccatttctcggctcgatgaccattccgaaaacggatattgccgtcattaaaggcgcgtgggtcgatggaatgggaagcccgtctacaggtgacttccatgatttagtcaagttatcgattcagggaaatctcaccgccccacagtcgtgcaaaattaatcagggcgatgttattaaggttaattttggattcatcaatggtcagaagtttaccacccgcaatgccatgccagacggttttactccagtagactttgatatcacttatgactgtggtgatacttcaaagattaaaaactcgttgcaaatgcgcatcgacggtacaactggggtagtagaccagtacaacctggtcgccaggcgaagaagttcagacaatgtgcccgatgtcggtattcgtattgaaaatctcggcggcggagttgcaaatattccttttcagaacggtatccttcccgttgatccttccgggcatggcaccgtcaatatgcgcgcctggccagttaatctggtcggtggtgagctggaaacaggaaaatttcagggcacagccaccattaccgtcatcgtgcggtaaaagaagacgttgcgttttgattaacgcaacgcttcggcactgttacccctgctgctccagcgcatacttatacagcgcatttttcttcacgccgtgaatttctgcggccagcgccgccgcttttttcagcggcagttctgcctgtagcagcgccagcgtgcgcagggcatcggcgggtaagtcttcttcctgtgctttatgaccttcgacaatcagcaccatttcgcctttgcgacggttttcatcttcctttacccacgccagcagctcgccaacgggcgcgccgtgaatggtttcccaggttttggtcagctcacgcgccagaaccacgtagcgggattcgcctaataccgcaacgatatcttccaggctatctaacagacggtgggtagattcataaaaaatcagcgtgcgcggctccgcttcaatggcttttagcgcatcacggcggccttttgatttggcaggtaaaaagccttcgtaacagaaacggtcagagggtaaacccgctgcgcttaacgcagtgatagcagcacacggcccgggtagcggcaccacgcggatccccgcttcacggcaggtacgcaccagatggtagccaggatcgttaattagcggcgttccggcatcggaaaccagcgcaatgttttgcccctcttgcagcttcgccagcagcgtttcagctttttgttgttcgttatggtcgtgcagcgcaaacaaccgggcattaatcccaaaatgttgcagcaataaaccggtgtgacgagtatcctcggcggcaatcagatcaacggcctgtaatacctctaacgcacgctgggtgatatccgccagattgccgattggcgtcggtacaatgtaaagctggccctgagaattatccgccgattggtgttgtttcattgtgtcgtccgtattgccgatttaatattgagcattgcgtaaaaaaaatatcactggatacattatggtaccctcaacattttctcgtttgaaagccgcgcgttgtctgcctgttgttctggcagccctgattttcgccggttgtggcacccatactcccgatcagtccactgcttatatgcagggcacggcgcaggctgattctgccttttatcttcagcagatgcagcaaagctctgatgataccaggatcaactggcaattactcgccattcgtgcactggtgaaagaaggtaaaaccgggcaggcggttgagttgtttaaccaactaccgcaagaactgaacgatgctcagcgtcgcgagaaaacactgctggcggtagagattaaactggcgcagaaagattttgctggcgcgcaaaacttgctggcgaaaatcacacctgccgatttagaacaaaaccagcaagcgcgttactggcaggcaaaaatcgatgccagccaggggcgtccttccattgatttactgcgcgcgttaattgctcaggaaccgctgcttggcgcgaaagaaaaacagcagaatattgatgccacctggcaggcgctctcctccatgactcaggaacaggcgaatacgctggtgatcaacgccgacgaaaatattctgcaaggctggctggatctgcagcgcgtctggtttgataaccgtaacgatcccgacatgatgaaagccgggatcgccgactggcagaaacgttatccgaacaatccgggcgcgaaaatgctgccaacgcagttggttaacgtaaaagcgtttaaaccagcctcgaccaacaaaatcgccctgctgttgccactgaatggccaggcagcggtatttggtcgcactattcagcaaggctttgaagcggcgaaaaatatcggcactcagccagtggcagctcaggtagctgccgcacctgccgcagacgtagctgaacaacctcagccgcaaaccgtggatggcgttgccagcccggcacaagcctcggttagcgatctgaccggtgaacagcctgcagcccagccggtgcctgtaagcgccccggcgacaagcaccgcagcggtaagcgcacccgcaaatccatccgcagagctgaaaatctacgatacctcatcacaaccacttagccagatcttaagccaggttcagcaggatggcgcgagtattgtggtcggtccgttgctgaaaaataacgttgaagagttgctgaagagcaacactccgctgaacgtactggcactgaaccagccggagaatatcgaaaatcgcgtcaatatttgttacttcgcgctttcaccggaagacgaagcgcgcgatgcagcgcgtcatattcgtgaccagggtaaacaagcgccgctggtgctgatcccacgcagttcattgggcgatcgcgtagccaatgcgtttgcgcaagagtggcagaaactgggcggcggcaccgttctgcaacaaaaatttggttccaccagcgaattacgcgcgggtgttaacggcggttctggtattgctttaacgggtagcccgattactctcagagcgacaaccgactccggcatgacgaccaacaatccaacgctgcaaaccacgccaaccgatgaccagttcaccaataatggcggtcgtgtcgatgcggtgtacattgtggcaacgccgggtgaaatcgcttttatcaaaccgatgatcgccatgcgtaacggtagccagagcggtgcaacgctgtacgccagctcccgcagtgcgcaagggaccgctggcccggatttccgactggagatggaaggcttgcagtacagcgaaatcccgatgctggcaggcggtaatctaccgttaatgcagcaggcactcagcgcggtgaataacgattattcactggctcgcatgtatgcgatgggcgtcgatgcctggtcgctggcaaatcatttctcacaaatgcgccaggttcagggttttgaaatcaacggtaataccggaagcctgacggctaacccggattgcgtgattaacaggaacttatcatggctacagtaccaacaaggtcaggtagtccccgtcagttaaccaccaaacagaccggcgatgcgtgggaagcacaagcgcgtcgctggctggaaggcaaaggactgcggtttatcgccgctaacgtgaacgagcgtggcggcgagatcgatctgataatgcgtgaaggccggaccaccatttttgtcgaggtacgctatcgccgctctgcgctttatggcggcgcggcagccagtgtgacccgcagcaaacaacacaaattattacagactgcccgcttgtggctcgcgcgtcataatgggagttttgatactgtggattgccggttcgatgtggtagccttcaccgggaatgaggttgagtggattaaggatgcctttaatgaccactcataattaaggtttaaggattagcgtgcaagaaagaattaaagcttgcttcactgaaagcattcaaactcaaattgcggcggcagaggcgcttccggatgccatctcccgtgcagccatgacgctggttcagtctctgctcaatggcaacaaaatcctctgttgtggtaatggaacttccgctgccaatgcacagcattttgctgccagcatgatcaaccgtttcgaaacggagcggcccagcttacctgccattgcactaaatactgataatgttgtcttaacggcgattgccaacgatcgcttacatgatgaagtgtatgcaaaacaggtgcgggcgctgggtcatgcgggagatgtattgttagccatttccacccgtggcaacagccgcgatattgttaaagcagttgaagccgccgttacgcgtgatatgaccattgtggcattgaccggctatgacggcggcgaacttgcaggtttgttagggccacaggatgtggagatccgcattccttcgcatcgtagtgctcgcattcaggaaatgcatatgctgacggtaaattgcctgtgcgatctgatcgataacacgcttttccctcaccaggatgattaaggagaatacatgaaggcattatcgccaatcgcagtccttatttccgcgctgctgttgcaaggttgtgttgccgctgccgtagtgggtaccgctgctgtgggtaccaaagccgcaactgacccacgcagtgtcggcacccaggtggacgatggtaccctggaagtgcgcgtgaacagcgcattgtcgaaagacgaacagattaagaaagaagcgcgcattaatgtaacggcctatcagggcaaagtgctgctggttgggcagtcaccaaatgctgaactttcggctcgcgccaaacagattgctatgggcgtagacggtgccaacgaagtgtataacgagattcgtcagggccagccgattggtctgggcgaagcatctaacgatacgtggatcaccaccaaagtgcgttcgcagctcttaaccagcgacctggtgaaatcgtccaacgtgaaagtgaccaccgaaaacggtgaagtgttcctgatggggctggtgactgaacgtgaagcgaaagcggcggcagatattgccagccgggtgagcggcgtgaagcgggtaactacggcgtttacgtttattaaatagcagccccttgtaatgcctgatgcgacgcttgccgcgtcttatcaggcctacaacgatacaaaccgtaggtcagataaggcgtttacgccgcatccgacatgttttccctcaaatcagaacaacagcgccagcccgccgacaatcacaccagacactgccaccatcgcccctgtcagccataaggctttcgccgggaacgctttgcgcagcataatcagtgacggcaaactcactgccgggagcgtcatcaacaatgccagcgccggagcggttcccatacctgccagcatcatcgtttgtacaatcggaatttctgctgccgtgggaatgacaaacaagcatcctgctaccgccatcgccaccacccacatcaggctgttatcgacagcaccatcggcatgggggaataaccagacgcgagcggcacccaacaccagtactgcaaggatgtaaaccgggatcgtactccagaaaagcgtccatagcgccctgccccagcggctaaaaaacccgccctgtgcttccggtatgtcaatttcgaccggtgcctgcgtttgcggtgtttcacgcacccatttttgcaccagcgtcgcaatcagcaacaccatcaccagcccggccaccagacgaatcgccgcaaaaccccagccgaggacaaagcccataaacaccagcgtcgccgggtttaacaccggattgcccatccagaatgccagcgcaccgcccatcgacacctgttggcgacgcattcccgccgcgaccggagccgcacagcaggtacacatcatgcccggcaacgaaaacagcgttcccagcagcgtgccgcgaaagcgcgattgcccaagcgtacgcaacaaccagtcacgcgggatcagcacctgaatcaacgaaccgaggatcacccccagcaccgccgctttccataccgcgaggaaatagatcatcgcgtaatccaacgccgcctgccatgggttagcatccgcctgcgcaaggatagatttaccgatactgtgggtttcggcagcagtaaacgctttgccgtagtaaggttcccatttcacataccagagaccggcaatgacaacgagaaagaaaagcgcgggtttccaccactgaatgggcgttgccgcctgagatgaagactgaccagtcatagcattccccaggaataagttatgataattgagcgcgtgaatattacgctcactatcaattcttgggaataattattcagctcttttgcgtaattctgaagagcttaaaatcgtcacgccttcatgctcaggccgcatcgactctgccagcatgacccgcgccacgtctctcgcatcaatggatttccagttacctggtaacaaacggaacagcggcgcaaaaagcgtttcgttcatccgctgtttgctacgatcgcccagtaacatcgacgggcgagcaatggtcaatttcggccagttctgggcgattaatgcttcttccatctcccctttgacgcggttatagaaaaacggcgagtgggcattggcacccatcgcactgactaccaacatatgctgcgcgcccagtcgccgcccggttaatgcggtatccactaccagcgtgtaatcggcatgaataaacgcctctttgctccccgcttctcgccgcgtggtgccgagacaacaaaacacaatgtcgatgggatcggtgacctgcgccaacgcgtcactcagttgcggatcatggggattaaacaccccgggcatatcgcccaacggacgtcgcgtcggcgcagcaatggcgttaactttcggttcgttaatcaacatccgcagcaggtgaccgcccaccagccccgttgcgcctgtaatcagtacctgactcatcttcgctcctttacagaattgtctgccttgcgctccacggctcatgcaccaggcttaatagaccatgaggtaattatccccgattgtgggaaattcgcctcatccaatgcaacaacgcggaggaagcatgagtaagaaaattgccgttttaatcactgatgaatttgaggattcagaatttacttcacccgcagacgagttccgtaaagccggacacgaagtgattaccattgaaaaacaagcgggtaaaacggtgaaaggcaaaaaaggagaagccagcgtgaccatcgataaatccatcgatgaagtgacgcctgcggagtttgatgccctgctgctaccgggcggccattcaccggattatctgcgtggggacaaccgttttgtcacctttacccgtgattttgtgaatagtggcaaaccggtgtttgccatctgtcacggcccgcagttgctgatcagcgccgatgtgattcgggggcgcaaactgaccgcagttaaaccgatcattattgatgttaaaaatgcgggcgcggaattttacgatcaggaagtcgtggttgataaagatcagctggttaccagccggacaccggacgatctgccagcgtttaaccgcgaggcgttacgcctgctcggtgcctgagtcgcgtagccaaatcatttttttaccaaagcccagcgtgttgtcggtgaatttgatttcatcgagccggatttcccacaccggggccgacagcattctggcaaccggaaagcgacgattgtacgccttgcgcgcgaggtcgctttcctcaccttccagcctgcggatctcacctttaaactgcacaccgcgaattaacgctaccgttttcggctgaccgtttaccgttccggcaaccgcagcctgcggcccactcatctgcgcgtggcgcgttttttcttccgtcaaaatgtagaaggcgactttctgcgcatcaaaaagataaaaggcattagcgcaccagagttccccttcctgctgcacacaccaagtgacaacatgttgttttgccagccaacggctgatggcgatgagtgtttccattgctgttctcttttatactgtgggcctgaccttaacatgcgacgcagacgatgacaccctggtttctttacttgatccgtaccgccgacaataagctttataccgggatcaccacggatgtcgaacgccgctatcagcagcaccaaagcggcaaaggggcgaaagcactgcgcgggaaaggagaactaacgctggtgttttccgcgccagtgggcgatcgttcgctggcgttacgggcggaatatcgcgttaagcaactgaccaaacggcaaaaagagcgtctggtagcggaaggcgcagggtttgcagagctgttaagcagtctgcaaaccccggagattaaaagcgattgaaatgctcgtgatactcaaccaggccggtaacgccattcagcgcgtcatccgctaaacgatgtacctggaaggcgctttcagtgcccggccagcggcaacgcagatcgtgatgcgccgccagttcaaagccgaaacgactgtacagcgccggatcgcccagcgtcaccactgcggcatagccgaactcattaagcgaatcgagtccttcatagaccagttggcgtgccagcccctgtccacggtatttttcatcaaccgccaacggtgccatgccgacccattgcaggtcttcgccctgcacatcaaccggactaaatgccacatagccaatgacctgaccttcgtcatctgtcgccaccagccccagcgtcagaaagccatcttcacgcagatcgtgaaccagcttcgcttccgcatcactttcgaatgagcgacgcagcagggcatcaatacccggcgcatcaatgggaatttctactcgaattagcatggttcacctaccgatgtctgtttggtttcaggcgcggttttcattcccgcctcaacaaaatccgccagttgcagcagcatcatgcgtaaggctttcggcatttgctccagttcaatggcgtccatcaggtttttcacatacagccccagctccgtatcgccttcaatcaccagccgacgctggaagaagagcgtatccggatcttgtttacgcgccgcaatcatcagcagatcgctggcgtcggcactaaaactcacatcagcttgcgcgttctggctaacgaccagtttgccattcaccaccgaggtaaaccattgcaggtcaatatcacgcacatgaatacttaaccagcggccttcaagaaactccagctcgccatcatccagcgcctggcggaattgccagcttaagacctgctcaagaacctggcgttttagcgcaaatggcgtcagttttaccggtacactcaacagagatggccccaaatgcacaatacgggaacgcagtttatccaacacgagttttactccctgtttcaacaatcatcctattttgccatatcagaaaaataacatagcggtataaatcaacaattccatatgaaattgctgctaccaccaatacaactttaactgccttaaatcaaaaattgtcgcagcaaggttaactaaaatcccagttcgttaacatttttgcgttttgatagcgcaaccttcaggaaaaattatggagctgctctgccctgccggaaatctcccggcgcttaaggcggccatcgaaaacggcgcagatgctgtttatatcgggctaaaagatgataccaatgcccgtcacttcgccggccttaactttaccgagaaaaaattgcaggaagcggtgagttttgtccatcaacatcgccgcaaacttcacatcgcgattaacacttttgcgcatccggacggttacgcccgttggcagcgcgccgtggatatggcggcgcagctgggtgccgacgcgctgatcctcgccgacctcgccatgctggagtacgccgccgagcgttatccgcatattgagcgccacgtatcggtgcaggcttcggcgaccaatgaagaggcgattaacttttatcatcgccattttgacgttgctcgcgtggtgctgccgcgcgtgttgtcgattcatcaggtgaaacaactggcacgggtcacacctgtaccactggaagtctttgctttcggcagcctgtgcattatgtcggaaggtcgttgctatctgtcgtcgtatctgacgggtgagtcgcccaacaccataggcgcgtgttctccggcccgtttcgtgcgctggcaacaaacgccgcaggggctggaatcccgcctgaacgaagtgctgatcgaccgttatcaggacggcgaaaacgcaggttatccgacgctatgtaaagggcgttatctggtggacggcgagcgctatcacgcgctggaagaaccaaccagtctcaataccctggaactgctgccggagttaatggcggcgaatattgcttcggtgaaaattgaaggccgccagcgtagcccggcgtatgtcagccaggtggcgaaagtctggcgtcaggctatcgaccgttgtaaggccgatccgcaaaactttgtaccgcaaagcgcgtggatggagacgctcgggtcgatgtccgaaggcacgcaaaccactcttggcgcatatcaccgtaaatggcagtgagaaaagcaatgaaatattccttagggccagtgctgtggtactggccaaaagagacgctggaagaattttatcagcaggccgccaccagcagcgccgacgtgatttatcttggtgaagcggtatgcagcaagcgtcgggcaaccaaagttggcgactggctggagatggcaaaatcgctcgccgggagtggtaagcagattgtgctctccacgctggcgctggtgcaggcatcatctgaactgggcgaactgaaacgctatgttgagaacggtgagtttctgattgaagccagcgatctcggcgtggtgaatatgtgcgctgaacgcaaactgccgttcgtcgccgggcacgcgctgaactgctacaacgcggtgacactgaaaatattgctcaaacagggcatgatgcgctggtgtatgccagtggagctttcccgcgactggctggtgaatctgcttaatcagtgcgatgagctgggcattcgtaaccagtttgaagtggaagtcctgagctacggtcatctgccgctggcctactccgcccgctgctttaccgcgcgttcggaagaccgcccgaaagatgagtgtgaaacctgctgcattaagtatccgaacgggcgcaacgtgctgtcgcaggaaaaccaacaagtgtttgtactcaatggcattcagaccatgagcggctacgtttacaacctcggtaacgagctggcatccatgcagggcctggttgatgtggtccgcctgtcaccgcagggtactgacactttcgcgatgctcgacgccttccgcgctaatgaaaatggcgctgcaccactgccgttgacggcgaacagcgactgtaacggctactggcggcggctggcaggactggagctgcaagcctaagtaaatagctcactttgttaacaactttaactactctttaatgcagtattaaagattaatcggtaacaaagtgagctgttatgactgataaaaccattgcgttttcgctactcgatctggcccccattcccgaaggttcttcagcgcgagaagcattctcccactctctcgatctcgcccgtctggctgaaaagcgcggctatcatcgctactggctggcagaacaccacaatatgactggcattgccagtgctgccacgtcggtattgatcggctatctggcggcgaataccaccacgctgcatctggggtctggcggcgtgatgttgcctaaccactcaccgttggtcattgcagaacagttcggcacgcttaatacactctatccggggcgaatcgatttggggctgggtcgtgctccgggtagtgaccaacggacaatgatggcgctacgtcgtcatatgagcggcgatattgataatttcccccgcgatgtggcggagctggtggactggtttgacgcccgcgatcccaatccgcatgtgcgcccggtaccaggctatggcgagaaaatccccgtgtggttgttaggctccagcctttacagcgcgcaactggcggcgcagcttggtctgccgtttgcgtttgcctcacacttcgcgccggatatgctgttccaggcgctgcatctttatcgcagcaacttcaaaccgtcagcacggctggaaaaaccatacgcgatggtgtgcatcaatattatcgccgccgacagcaaccgcgacgctgaatttctgtttacctcaatgcagcaagcctttgtgaagctgcgccgtggcgaaaccgggcaactgccgccgccgattcaaaatatggatcagttctggtcaccgtctgagcagtatggcgtgcagcaggcgctgagtatgtcgttggtaggtgataaagcgaaagtgcgtcatggcttgcagtcgatcctgcgcgaaaccgacgccgatgagattatggtcaacgggcagattttcgaccaccaggcgcggctgcattcgtttgagctggcgatggatgttaaggaagagttgttgggatagtgtgtcttaacgcgggaagccttatccgagctggcaacgctgtcctacatagacctgataagcgaagcgcatcaggcattgtgtaggcagcagaaatgtcggataaggcaccgctgattactgatacaccggcagtaaattaaagctcgataaaatatgcaccagtgcgttgccgacgccaaacaccagaatcagcgcaatcatcggcttgccaccccagacgcggaatttcgggctgccaaagcgtttacgcgatgcacgggctaacagcgccggaacaattgccgcccagatggtagccgctaaaccagcataaccaatggcgtacaggaatccgttcgggaacaacagcccccccacaactggcggggcaaaggtcagcaatgccgttttcaagcggcccacagccgagtcgtcgaaaccaaacagatctgccagatagtcaaacaaacccagcgttacgccgaggaacgaactcgctaccgcaaagtttgagaacacgaccagcagcagatccagactacggctgttcagtacgccgcttaacgcctgtaccagcacatcaatattaccgcccttctctgcaataccgataaactccggacgcgggatgttacccatcgtcgccagcaaccagatggtatacagcgccagcgccatcagcgtaccgtacaccagacatttcacgatggttttcggatctttgccgtaatacttcatcaggcttggcacgttaccgtgataaccaaacgatgccagacagaacggcagggtcatcaacagatacggtgcataagacgcattgctttcggcgacgttgaacaatgtcgcaggctgcacatgccccagcaggctaccaaaggtgaggaagaaggtaatgactttcgcccccagcacaatcgctgtcatgcgactgacggctttagtgctcaaccacaccacaaacgctaccagcaatgcaaaaccaaaacccgccgcccgtgccgggacgtttagtgacatctctgcgaaggtgtgatgcagaatcgaaccactggcagaaatataggcataggtcaggatatagagcacaaaggcaatggaaatgccgttgaccacgttccagcctttgcccagcaaatctttggtgatggtgtcaaaactcgaaccgattctgtaattcaggttagcttccagaatcatcaagccggaatgcagcatacagaaccaggtaaagatcagcgccgccattgaccagaaaaaccacgccccggacatgaccactggcagagaaaacatccctgcgccaataatggtgccgccgataatcaccacgccgccaagcagcgacggtgacgtttgggtggtggttagtgttgccatgagggcttctctccagtgaaaaatagtgcgactgcgttgttatgcattgcactgtaccagtacacgagtacaaaagacagaaaaaaagccccgatggtaaaaatcggggctgtatatattattttacagattgtgttcgctgttcagcgatgattacgcatcaccaccgaaacgacgacgaccggtagaatcatcacgacgcggagcgcggccttcacgacgttcgccgctaaaacgacgaccatcaccacggccaccttcacggcgttcaccgctgaagttacgaccgccttcacgacgttcgccaccgaaaccacgaccaccgccacgacgctcaccgccagtatgcggctgtgcatcgcccagtaactgcatgttcatcggcttgttgagaatgcgagtgcgcgtaaagtgttgcagcacttcacccggcatacctttcggcagttcgatggtggagtgagaagcaaacagcttgatgttaccaatgtaacggctgctgatgtcgccttcgttagcaatcgcaccaacgatatgacgaacttcaacaccatcatcgcggcccacttcaatgcggtacagctgcatatcgccaacatcacgacgttcacgacgcggacgatcttcacggtcaccacgcgggccacggtcgttacgatcgcgcggaccacggtcatcacggtcacggaattcacgtttcggacgcatcggcgcatctggcggtacgatcagagtacgttcaccctgtgccattttcagcagtgccgcagccagagtttcgagatccagctcttcaccttcagcagtcggctgaattttgctcagcagtgcgcggtattgatccagatcgctgctttccagctgctgctgtactttagcggcgaatttttccagacggcgtttgcctagcagttctgcgttcggcagttctacttccggaatagtcagcttcatagtacgttcaatgttgcgcagcagacgacgctcgcggttctcaacgaacagcagcgcgcggccagcacgacccgcacgaccggtacgaccgatacggtgaacgtaagactcagaatccatcgggatatcgtagttaactaccaggctgatacgctcaacgtccaggccacgggctgcaacgtcggtcgcaatcaggatgtccagacgaccatctttcaggcgttccagtgtctgttcacgcagcgcctggttcatgtcaccgttcagcgcggcgctgttgtagccgttacgctcaagagcttcagccacttccagagtcgcgtttttggtacgaacgaagataatcgccgcatcaaaatcttccgcttccaggaaacgtaccagtgcttcgtttttgcgcataccccagacagtccagtagctctggctgatgtcaggacgggtagtcacgctggactgaatgcgcacttcctgcggctctttcataaagcggcgggtaatgcgacgaatcgcttccggcatggttgcagagaacagagcggtctgatgaccttccgggatctgcgccataatggtttcaacgtcttcgatgaagcccatgcgcagcatttcgtcagcttcatccagaaccagaccgctcagtttagagaggtccagagtgccacgtttcaggtggtccagcagacggcccggagtaccgacaacgatctgcggcccctgacgcagggcgcgtaattgcacgtcataacgctggccgccgtacagagcaaccacatttacgccgcgcatgtgtttagagaaatccgtcattgcttcagcaacctgtaccgccagttcgcgggtcggtgccagcaccagaatctgtggtgctttcagctcaggatcaagattctgcaacagaggtaaagagaatgctgcagtttttccgctccccgtctgggccatacccagaacgtcgcggccattcagcagatgtggaatacactctgcctgaattggagatggtttttcgtaacccagatcgttaagggcttcaaggataggagccttcaggcccagatctgcaaaagtggtttcgaattcagccatgtagtacgtgtgcctcaaaattaatggcggccagtctacataactcatcatgaaattgatcagcaattttcattgaaaagtgtgaaccggctcaaagtaggtgtattaacgaacaacaacgccctcacccgttaaggtgatggcaatcaaaaaagattacgggctgatgtgtacgtcagctattgctggtccgattctgccaggtcatcttggtcctggcccaggagcgataattccaacaatgcgtatcggtgctcaacaaagttatgaacgttgttggcaaccgccagtttgaacagtgccgtggcgctgtccaaatcccccagacttaggtagtacttacctaaatagaagttggtttcactgagatgctcagcgagcgaggtgttatccgttgcgtccgccttgagcctttccattaacgtttgttcgctaatgttgcccaggtagaactcgacaatgttccatccccactgttccttatccgatttttcgaagtgctgtttcaacacttctttagcctgcttctcatcgagcttctgctcggcgagataaagccacagactacggaaaggatcattgggatcgtcttgataaaacgccagcagatcatcttgcgctaacttgtcacgaccgccgtaatataatgcgatcccgcgattcaagtgcgcgtagttgtaagttggatcaagctcaagtacagaatcaaacgcttcataggcagcatcaaaattgcctgcctgcgttaaatatatgcctaagtaattgaatacttcaggcatatccggtcggattgccagcgcttgcgaaaaatcgttacgcgctaatgccctcagaccgagactatcatacaacactccgcgctcatataaaagctgtgcgcgttcgtcatcggttaaagcccgactggcaaggatttgttccatacgtgccagaatcacttcctgctgtaaagtcggttgcaatggtaccgcgaggacttcacttttacgccaggaagtattactgcatcctgcaagcgtaagtgctgtcgcaacgaaacaccagcgcaaaaaaggcttcatttcccactcccgaagaccacggttgaatgaacgtcctgttcccggttgctaacaaggcgtcctgcccggttaaaagccccccgccgcagcggagggcaaatggcaaccttactcgccctgttcagcagccggagcttccggtgctgcagcaggttgagactgctcagtcgcttctttaatgctcagacggatacggccctggcgatcaacttccagaactttcaccggtacttcctgacccatctgcaggtaatcggtcactttctcaacgcgtttgtcagcgatttgagagatgtggaccagaccttctttaccgccgccgatggcaacaaatgcgccaaagtcaacgatacgggtcactttaccagtgtagacgcggcccacttcgatttctgcagtgatctcttcgatacgacgaatagcatgtttcgctttctcgccgtcggtcgctgcaatcttcacagtaccgtcatcttcgatttcgatggtggtgccagtttcttcggtcagagcacggattacagaaccgcctttaccgataacatctttgatcttgtccgggttgatcttgatggtatggatacgcggtgcgaactcagagatatcgccacgcggcgcgttgatcgcctgttccattacgcccaggatatgcagacgcgcacctttagcctggttcagcgcaacctgcatgatctctttggtgataccttcaattttgatatccatctgcagtgcagagataccgtcgcgggaacctgcaactttgaagtccatatcgcccaggtgatcttcgtcgcccaaaatgtcagacagtacaacgtagttgtcgccttctttcaccagacccattgcgatacccgcaacggcagctttgatcggcacacctgcgtccatcagcgccagagacgcgccgcacacggaagccatagaagaggaaccgttggattcagtgatttcagacacaacacgtacggtgtacgggaatttgtccatatccggcatgactgccagcacgccgcgcttcgccagacgaccgtgaccaatttcacgacgcttcggagaaccgaccatgccggtttcgcctacggagtacggagggaagttgtagtggaacaggaaggtatcggtacgttcgcccatcagttcatcaagaacctgcgcgtcacgagcagtacccagcgttgcggtaaccagcgcctgcgtttcaccacgggtgaacagcgcagaaccgtgagtacgcggcagcacgccagtacgcacatccagaccacggatcatatctttttcacgaccgtcgatacgcggttcgcctgccagtacgcggctacgaacaacgtttttctcgatcgcgtgcagaatttcacccagttcgttttcgtccagggtttcgtcttcagcaagcagcgtcgcgatggtttcagatttgatgacatcaacctgcgcataacgctcttgtttgtcggtgatgcggtaagcatcgctcaggcgagcttcagccagtgcagcaacgcgcgcgtttagcgcttcgtttaccggctccggctgccagtcccaacgcggtttaccggcttctttcaccagttcattgatgttctgaataacaacctgctgttgttcatgaccgaacactactgcgcccagcatctggtcttcgctcagcagttgagcttcagattcaaccatcagtacagcggcttcagtaccggcaacaaccagatccagtttgctctctttcagctcgtcctgagtcgggttcagtacgtactggtcattgatgtaacctacgcgggcagcaccaatcgggccattgaacggaataccagacagagacagcgctgcggaagcaccaatcatcgcgacgatatccgggttaacttgcgggttaacagaaaccacggtggcgataacctgaacttcgttgacgaagccttccgggaacagcgggcgaatcgggcggtcaatcagacgcgcgatcagggtttcgccttcgcttgggcggccttcacgacggaagaagctacccgggatacgaccagcagcgtaggtacgctcctgatagttaacggtcagtgggaagaagtcctgacctggtttggcttttttctggccaacaacggtaacgaataccgcggtgtcatccatgctaaccataacagcggcagtagcctgacgagccatcatgccggtttccagagtcacggtgtgttggccgtactggaatttacgaacgatcggattaagcaatgtaatatcctttctctttcttagacagtaccttacggcactggtgttaatacccgatcttctgcgcatcctcgcgactaatgacaaccctaacccagctctatgtgggtaaagcctctcattagccgcgcgaacctctgcaacggaagatcattcatagcaacaatacattagtttccagtgaattgctgccgtcagcttgaaaaaaggggccactcaggcccccttttctgaaactcgcaagaattagcgacgcagacccaggcgctcgatgagctgggtgtaacgtgctacgtctttacgtttcaggtagtcgagcagtttacgacgctgagaaaccatgcgcagcagaccacgacggctgtggtgatcttttttgtgctctgcaaagtggccctgcaggtggttgatctgtgcagtcagcagtgctacctgaacttcggtagaaccggtgtcgtttgcgtcacgaccaaactcagaaacgattttagctgttgcttcagtacttagagacattttaaaactccaaagtatatagaatgaaaggacgccgatctctaattcagcgatcccagtgtacgttacgcaaagtgttaaacaatttacgcgacgttaagcggcagtattctactcgtagcgacctgttatcgcaagacggttaacattacgccgggtattcaaccaccaggcgacgaggcgcaacgcggccttcatcgtcaatttcgcccataccgataaatttgccgttctcaccttccgtgacgcgaaccagtccttccagtggcgcaccagatgtacgaaccgggttaccatttttgaagtaaacagaagacgttaacggaagattcaccaccggatagtccgaagctggactgtccattggcatcagtaatggatcaagtaactccgcggctggaatatcctgctgttcagcttgctcaacaagttcacgcaggtgctccagggtcaccatccgttcaaccggatatttacttaccgccagacggcgcaggtaaataacatgcgcgccacagccgagtttttcacccaggtcatcaatgatggtgcggatataagtgccttttgagcagtgaatttccagctccagctcattgccttcatggcgaataaacagcaattcataaacggtaatcggacgcgcttcacgcggaacttcaatgccctgacgcgcatattcgtacagttttttgccctgatatttcagtgctgaatacatcgaagggatctgttcgatatcgccacggaaagtatccagtgccgctgccagctgctctgcgctaaaggttaccggacgttcttcaacgatctgtccgtcggcatcagaagtatcggtacgctgtccaagacgcgcaatgacccgatagcgtttgtcggagtccagcagatactgggaaaacttcgtcgcttccccgaggcaaatcggcaacatgccggtcgccagcgggtccagcgcaccggtatgcccggcacggttggcgttatatatacgtttcactttttgcagcgcatcgttgctggacataccctgaggtttatccagcaacaaaacgccgttaatgtcgcgaccgcgacgacgaggacgactcattagtcctccttgctgtcgtccgggttaacacgacgttcttcgtcatgtttgaccacgctggtcaccaggtttgacatgcgcatcccttcaaccagagagttgtcgtagaagaaggtcagttccggcacgatacgcaggcgcatcgctttccccagcaggctgcggatgaaaccagaagcttcttgcaacgctttgatgcccgctttaaccgcgtcttcatctttgtcgttgaggaacgtcacatatactttggcatacgccaggtcgcgagacatttcgacaccggaaacggtggtcatcatgcccaggcgaggatctttaatttcacgctgcaggatgagagcgatctctttttgcatttcctgcgctacgcgctgcgggcgaccaaattctttcgccataataaattctcctgacaaaaaaggggctgttagcccctttttaaaattaatttcaggtggaagggctgttcacgttgacctgataagacgcgccagcgtcacatcaggcaatccatgccggatgcagcgtaaacgccttatcccgcatggaaccctaaaaaccttaagcaatggtacgttggatctcgatgatttcgaatacttcgatcacatcgccagtgcggacgtcgttgtagttcttaacgccgataccacattccataccgttacggacttcgttaacgtcatctttgaagcggcgcagggactccagctcgccttcgtagataaccacgttgtcacgcagaacgcggatcgggttgtgacgtttaaccacaccttcggtaaccatacagcctgcgatggcaccaaatttcggcgatttgaacacgtcacgaacttccgccagaccgataatctgctgtttcagttccggagacagcataccgctcatcgccgctttcacttcgtcaatcaggttatagatgacggagtagtaacgcagatccaggctttccgcttcaatcactttacgtgcagaggcatcagcacgtacgttaaagccaaccaggatggcgttggacgccgcagccagggtggcgtcggtttcggtgataccacctacgccagaaccgatgatcttcactttaacttcgtcagtagacagtttcagcaaggagtcggagatcgcttcgacagaaccctgtacgtctgccttcaggacgatattcacttcgtgaacttcgccttcggtcatgttggcgaacatgttctcgagtttagatttctgctgacgcgccagtttaacttcgcggaatttaccctgacgatagagtgcaacttcacgcgctttcttctcgtcacgtacaacggtaacttcatcacccgcagccggtacgccggacaggccgaggatttccaccggaatggacggacccgcttccagcacttcctgacccagttcgttacgcatcgcacgaacacgaccgtattcgaagccacacagaacgatatcgcccttgtgcagagtaccttcacgtaccagaacggtagcaaccggaccacgacctttatcgaggaaggattcgataaccgcaccgctcgccatacctttacgtaccgctttcagctccagaacttccgcctgcagcaggatagcgtccagcagttcatcgataccggtacccgctttcgcagatacgtgtacgaactggctttcaccgccccactcttccggcaggatgccgtactgggagagttcgttcttaacgcgatccggatcagcttctggtttatcgatcttgttcactgcaaccaccaccggtacctgcgccgctttcgcgtgctggattgcttcgatggtctgcggcatcacaccgtcgtcggcagcaacaaccaggactacgatgtccgttgcctgcgcaccacgagcacgcattgaagtaaacgcggcgtgccccggggtgtccaggaaggtgatcatgccgttttcagtttcaacgtggtatgcaccaatgtgctgggtaatgccgcccgcttcgccagaggccactttcgttgaacgaatgtagtccagcagagaggttttaccgtggtcaacgtgacccatgatggtcacaaccggcgcgcgcggttcagccgcagcacccgtgtcacggtcgctcattaccgcctcttccagctcgttttcacgacgcaggataactttatggcccatctcttcagcaaccagctgtgcggtttcctgatcgataacctggttgatggttgccattgcgcccagtttcatcatcgctttgatgacctgagagcctttaaccgccatcttgttcgccagttcgccaacggtgatagtttcgccgatcacaacgtcacggttaacggcctgagcaggcttctggaagccttgctgcagcgaagaacctttacgttttccgcctttaccgccacgtactgctgcgcgtgcttcttcacgatcagcttttgattcagcgtgtttgttgcctttcttcggacgcgctgctttcgcgttacgaccacggccacggccgccttcgacttcacgatcgctttcgtcttctgcctggcgagcatgttgagaagtagtgacgtgataatcgctggaatcttcagtcggttccgcgttatcagtccatttgttttcttccgccatacgacgtgcttcttcagcaacgcgacgtgcttcttcttcgagtttacgacgcgcttcttcttcagctttacgcttgagctctgcagcttcctgctcacggcgggctttttcagcctgggcgtttttagtcatatcgtcttgttgattgctcactttgtctttttccgcagcttcacgtttcgcttgttcagcagcttcacgcttagcttgttctgcggcctcacgttcagctttttgttgcgcctcgcgtttagccgattcttctgcctcacgacgggcttgctcttccgcttcacgctgcgcttgctcttccgctgcaaggcgttcagcctcttgcggatcgcgtttcacaaaggtgcgtttcttgcggacttcgatttgtaccgatttgctttttccaccggtaccaggaatgttaagggtgctgcgtgttttacgttgcagcgtcaatttgtccgggcctgaatttttctgattcaggtggtcaatcaaagtctgtttctcttgtgcagacacagagtcgtcagcagacttccggatacctgcatcagcaaattgctgtaccaggcgttccacggaggtctgtcgctctgcggccagcgttttaatcgttacatctgtcatgctgttccttcctgctacagtttattacgcttcgtcaccgaaccagcaaatattacgggcagccataatcagtgctccggctttttcgtcggtcaacccttcgatatcagccagatcatcaatgccctgttcggcgagatcttccagcgtacaaacgccacgggcggccagtttgaatgccaaatcacgatctaccccttcaaggttcagcagatcgtcagccggtttgttatcaccgaggctttcttcctgggcctgtgcaatggtggccagtgcatttttagcacgctcgcgcagtgcttcaacggtcggctcatcaaggccttcgatttccaacagctctttcatcggcacataggccaattcttccagcgtcgagaagccttcttctaccagaacagtcgcgaagtcttcgtcgatgtcgagatatttggtgaaggtgtcgatcgctgcgtgcgcttccgcctgatgcttagcctgcaggtcgtcaacggtcatcacgttgagttcccaaccgctcagctgcgaagccagacgcacgttctgaccgttacggccaatcgcctgcgccaggttaccggcttcaacggcgatatccatggtgtgtttatcttcatccaccacgatagaagcaacgtctgccggtgccattgcgttaatcacgaactgcgccgggttatcatcccacaggacgatatcgatacgctcgccacccagttcagtagacaccgcctgaacacgcgcgccacgcatacctacgcaagcacctaccggatcgatacgtttatcgttggttttcaccgcgattttcgcacgagaacccggatcgcgagccgctgctttaatttcaatcacttcttcgccgatttctggcacttcaatacggaacagttcgatcagcatttccggcttggaacgagtgacgaacagttgcgcgccacgcgcttccgggcgaacggaatagagcacgccacgaacgcggtcgccagggcggaagttttcacgcggcagcatatcttcgcgcaggatcacggcttcagcgttgttgcccagatccagagagatgttgtcgcggtttacttttttcaccacgccggtgatgatttcaccttcgtgttcacggaactgatcaaccaccatcgcacgttcggcttcacgcactttctgcacgataacctgttttgccgtctgggtagtgatacggtcaaaggtaacagactcaatctgatcttcaacgtaatcgcccaggttcaggctttcatcttcataacgtgcggcttcaagggtgatttccttggtcggctgggtgacttcatcaacaactaaccagcgacggaaagtgtcaaaatcaccgcttttgcgatcgatctgtacgcggacgtcgatctcttgttcatattttttctttgttgctgtcgccagcgcgctttccaatgcttcgaaaatcttctcgcgaggtagcgccttttcattggatacggcttcaactacagccaaaatttctttgttcatcgcgggcttttcacctcatccagactattaaaagtggggaaccaggttcgccttctggatattactcagcgcgaacacttcatctttaccttcgacggtaactgtgatcatttcaccgtctaccgctttgataacgccctgccatttacgacggttttgtaccgccatacggagaaccagagtcacctcttctccgacaaaacgggcgtagtgttcagccgtgaacagtgggcgatcgagacccggtgaggagacttccaggttataagcaacggtgatgggatcttcaacatccagcacagcacttacctggtggctcacatcagcacaatcatcaacattgatgccatcttcactatcaatatagatgcgcagtgtggatgtgcgaccgcgaataaattcgatgccaaccagttcaaaacccagggcctcaactggcgcagtaatcatctctgttaatttttgctctaatgtggacaagcccacccccaagacataaaaaaagggcctaaagcccagttattctgtagtcagataacaaaaaaccccgataaatcggggctttatataactgaaccctataaccgcaactgcggtctggagcactttccagaaggattttttcaaatcccactacgaaggccgaagtcttcacagtatatttgaaaaaggactctaagggaaagtggttgcgggggccggatttgaaccgacgatcttcgggttatgagcccgacgagctaccaggctgctccaccccgcgcctgaaacgtggcaaattctactcgttttgggtaaaaaatgcaaatactgctgggatttggtgtaccgagacgggacgtaaaatctgcaggcattatagtgatccacgccacattttgtcaacgtttattgctaatcatgtgaatgaatatccagttcactttcatttgttgaatacttttgccttctcctgctctcccttaagcgcattattttacaaaaaacacactaaactcttcctgtctccgataaaagatgattaaatgaaaactcatttattttgcataaaaattcagtgagagcggaaatccaggctcatcatcagttaattaagcagggtgttattttatgacgacgattctcaagcatctcccggtaggtcaacgtattggtatcgctttttctggcggtctggacaccagtgccgcactgctgtggatgcgacaaaagggagcggttccttatgcatatactgcaaacctgggccagccagacgaagaggattatgatgcgatccctcgtcgtgccatggaatacggcgcggagaacgcacgtctgatcgactgccgcaaacaactggtggccgaaggtattgccgctattcagtgtggcgcatttcataacaccaccggcggcctgacctatttcaacacgacgccgctgggccgcgccgtgactggtaccatgctggttgctgcgatgaaagaagatggcgtgaatatctggggtgacggtagcacctacaaaggaaacgatatcgaacgtttctatcgttatggtctgctgaccaatgctgaactgcagatttacaaaccgtggcttgatactgactttattgatgaactgggcggccgtcatgagatgtctgaatttatgattgcctgcggtttcgactacaaaatgtctgtcgaaaaagcctactccacagactccaacatgcttggtgcaacgcatgaagcgaaggatctggaatacctcaactccagcgtcaaaatcgtcaacccgattatgggcgtgaaattctgggatgagagcgtgaagatcccggcagaagaagtcacagtacgctttgaacaaggtcatccggtggcgctgaacggtaaaacctttagcgacgacgtagaaatgatgctggaagctaaccgcatcggcggtcgtcacggcctgggcatgagcgaccagattgaaaaccgtatcatcgaagcgaaaagccgtggtatttacgaagctccggggatggcactgctgcacattgcgtatgaacgcctgttgaccggtattcacaacgaagacaccattgagcagtatcacgcgcatggtcgtcagttgggccgtctgctgtaccaggggcgttggtttgactcccaggcgctgatgctgcgtgactctctgcaacgctgggttgccagccagatcactggtgaagttaccctggagctgcgccgtgggaacgattattcaatcctgaataccgtctcagagaacctgacctacaagccagagcgtctgacgatggaaaaaggcgactcggtgttctcgccagatgatcgtattggtcaattgaccatgcgtaacctggatatcactgatacccgcgagaaacttttcggttatgccaaaactggcctgctttcctcctctgccgcttcaggcgtgccgcaggtggagaatctggaaaacaaaggccagtaattcgacatcaaccctgcccttcaggggtggggttaccttgcttatcctctgtaaactcctttctgagcatcacataatcgaaaacatcatggtttgcatccacaacccgtgagtctcctttatagtgtgcaatcacttcctcaagcgtttgcggctgttccggctttgttacccccatccacgcattaataaggtaattattgtaagctgtcgaaaagatgttgttttccgttgtgcgatccacgccatccccaagaacggggctataccagataaacatcgggacatgatatgcctgctggctagcctccctgcctccatgaaaatagacgttcttcttcgtagggtcacgttccaggccgtggtcggcaaaatacatgaccgaggcgcggcgatcttttaataattcaaaaacctgacctagcaaactatctgtgtaatgaatggagttgtcatagcaggcatcctgatcgtcctgcggttgaaacacggcgctggattgcggataggcgctacaagccggttcatggcttccatttaaatgaagaacaatcagtttcttttgctgcgtattttgctgtaatgcttgcgataaatgcggcaacaacaattcatcaaatcctctgacataaactgtttccatggcgcgcatggcgatactggtaactgctgtaccattctgccgaaaagcggattgcgagcttagccagaaagtctgaaatcctgcttgattagccatattaataatgttgtcggggtaattatgaatgtcatgactcaaaacagaatcagcagttaaagaaaggggaaccgacagcgcagtgtaaggtgcgccgcttattgcttgattaaacagtttgatctgttttctttgtgcttcaacttgcggtgtcgtagagcgtgtatatccatacaaagacatattgtcgacacgtacagactcccccacaatcaacacgtaggtatcaatacctgtatccctgactgataattgaaaatacggcaccgtgtttgcaattgagagtaatctttgatgctctttcgctgctaaagcaaaatagttgagattgaaaaacggcgtataggtagcaaatcgcgacgctagtatatatggactgaacgcttttttattttttgcatctttataagcaaattgacaagcggaaaataaactgcccgaaatgacaatcagcaataatattcctgtcactttttttgtcggcaaggaaacatcatattttattattactgccaaaaaaagaagggataaaaaagcaaaggcacatagataagggatatacatccccagcattttgacaacttcatccggatcactctggagcacactaatcgcaaatccatcattgaaagttgtaccaaaggtacaccatgaatagaggctaatactcatgtctgccgcagtcagtaacacaaatggtgcggcaacaagcaggcgaagcggaagggatgatatacgttttacaaccaggatggtcagaacgaagaacagcaagcgctgaaccatatgcgctccggaagaagcgactaagttcgtaataccaaaaacaataacacaaagatacaacaaccaatgagatttaaaagttctagcaaatttgttgaatactgtcatccagaaatccaagttcacaaccaatataaacaattatcaacaatgtttaattttatatcagacatgtttttcaactctgatccatatcagaacgaaacactgttagttttttctttttaaatgatgcggccattgcgttctcagtaattaaataacattatcaatgcgtctctaaacattacgcagaacgtagccatcagtcgttatactgacaggagcaggatggtttatcgagaagtaaacatatccgtattcgtaccggaactggagttgacacaataaagtgccaattatgtcagtagaagggaaaaatttataactaaggcgtaccggcaccatcgtttcaaggtaccagctacgagtaaagcaactggacgagatacagatacctgacaaccattcctcagaccaggaccaaaacgaaaaaagacgcttttcagcgtctcttttctggaatttggtaccgaggacgggacttgaacccgtaagccctattgggcactaccacctcaaggtagcgtgtctaccaattccaccacctcggcacggatactactttttagttcgggatatcgctggtcggcttagccggagcagctggctgagtttgttcggttttcgccggtgcactcagattttcccattcgctacctttattggttttgttgctattgatgttacccagcaccagactgatgatgaagaataacgttgccagcagcgccgtcatgcgggtcatgaagttaccagaaccacttgaaccaaacagcgtagcggaagcgcctgctccgaaggaggctcccatatcagcgcctttaccttgctgcagcatgatcagaccaacaaggccaattgccacaataaggaaaactactaaaagagcttcatacataatcaacctgttccttgcggagttgccgcgtaccaatgcttcaaccaataaagcgggagtttttaatctttcccactgaagcgggtgtgaatactaaccaaagcgaatgaccttcgcaagggcaattttatcgcattgtatcaactgcggaaaaaaacagcaaaaccgatgtgttcgctgagaaaaaaggcgacaatcgccgcctttttagccagttatctaacgctttaaacggcttttactgcatcggcgatgcggtgtgcaaattcagtcacctgcgcttcgtcttcgccttccaccatcacgcgaattaacggttcggtgccggatttacgcagcaacacgcgtccacggttgcccagcgcagcttcaacctctgcggtcacggctttaactgactcatgctcaagtggatcgccgctacctgcggtgtaacgtacgttaaccagaatctgcgggaacattttcatgccgctgcaaaggtcgtgcaggctcatatggttacgtgccatcgccgccagcacctgcaagccagcaacgatgccgtcaccggtagtagttttatccagcaggatcacatgaccggaattctctgcaccgatacgccagcctttctcctgcattttttccagtacgtagcggtcacccactttcgcgcgcgcaaatggaattcctaactgtttcagcgccagttcaagccccatgttgctcatcaatgtacccacagcgccaccacgcagctggccctgacgaagaccttcacgcgcgatgatatacatgatctgatcgccatcgactttattgccttcatggtcaaccataatcacgcgatcgccatcgccgtcgaaggcaataccgagatccgctttttcagccagcacacgagcctggagcgcgcgaacgtcggtagcccccacttcggcattgatgtttacaccgtttggctcacaaccgatagcgataacgttcgcccccagttcgcgcagcacgttcggcgcgatgtgataagtcgcaccgtttgcacaatccaccacaatcttcagttcactgaggctaagttcgttcgggaacgtggctttgcaaaactcgatatagcgacccgcggcatcaacgatacggctggctttacccagttctgccgaatcaacgcagctgatctccttttccatttccgcttcgatggcctcttctaccgcatccggcagtttggtgccgtcgatagagaagaatttaatgccattatcgtagaacgggttatgcgatgcagatatcacaattccggcctctgcgcggaaggtacgcgtcagataagccacggccggtgttggcatcgggccagtgaagagtgcggaaaggcccgctgccgccagacccgcttccagtgctgactccagcatatagccagaaatacgcgtgtctttaccaataataatcttacgggagccgtggcgcgccagcactttacccgcggcccaacccagcttaagcacaaaatcaggtgtgatcggcgcatcccctacacgaccacgaatcccatcggtaccgaaatatttacgattactcatagcgtttgttttcctttgcagacagagtggcttccaccacccgcatcgcttctacggtttctttgacgtcatgaacacgaatgatgtgcgcgccttgcattgcggcaatgaccgcacaggccagactaccgctcaggcgctcggacggccccacgttcagcagctgcccaatcatcgattttcgtgacatacccaccaacagcggcaggttgaaatggtgaaattcagccaggcgcgccagtaatgaatagttatgggagagatttttaccgaaaccgaatccggggtcgagcaacaatttctcttttgcgatacccgcctgctcgcaacgtgctatttgctcaataaagtagcgattcacttctgcaaagacatcgtcatacttcggagcttcctgcatggtttttggatttccctgcatatgcatcagacaaaccggtaaaccggtttctgcagccgcctccagagcgccaggttcggaaagggagcggatatcattaataatgtgagcgccaactttcgctgactcacggatgacttctggtttggatgtatcgactgagatccagacttcgaagcgttgagcaattgcctcaaccacaggaataacacgttgcaactcttcttcaacgctaacttccgccgcccctgggcgcgtggactcgccaccaacgtcaatgatcgtcgcgccagcgttgatcatcagattcgcatgtttcaccgcatctatcagcgagttatgcgtgccaccatccgaaaaggaatcaggcgtgacgttgaggatccccattacgtgaggatggctaaggtccagtgaagtaccctgggcaaagagtttcatgatgttatccctggtatgaattgataagaaaaaaccccggagcacgccccggggttttcggtacaaatacagtcatctgatgcgggaacttacttgtcgcctaactgctctgacatggtgttacccgggttcggcgtacgcggttcatcaaccggacgaggagcctttggactaccattgtcgccagaattgttagaagcgcctggttcttcccagcccgctggcggacgtacatcgcgacgtgccatcaggtcatcaatctgcggtgcgtcgatagtctcatatttcatgagagcatctttcatcgcatgcagaatatccatattgtcggtcagaagctgacgcgcacgattatagttacgctcaatcagtgctttcacttcctggtcgatgatacgtgcagtttcatcggacatatgtttcgctttcgctacgctacggccgaggaacacttcaccttcttcttccgcgtacagcagtggacccaatttctcagagaagccccactgagtcaccatgttacgtgccaggttggtcgcaactttaatatcgttggacgcaccggtagatacatgttccggcccgtagatgatctcttctgccagacgaccaccgtacagcgtagaaatctggctttccagtttctgacggctggcgctgattgcgtcgccctcaggcaagaagaaagtcacacccagcgcacgaccgcgtgggataatcgtcactttgtgcaccggatcgtgttccggcaccaggcgaccgataatcgcatgacccgcttcgtggtaagccgtcgattctttctgcgcttccgtcatcaccatggagcgacgttccgcacccatcatgattttgtctttcgctttctcgaactcaaccatcgacacaacgcgtttgttgccacgagcagcgaacagtgccgcttcgttcaccaggttcgccaggtcagcaccggagaaaccaggagtaccacgggcaatgattgccgcgtcgatatcgggtgccaatggtacgcgacgcatgtgaactttcaggatctgctcacgaccgcgaacatctggcaagccgaccacaacctgacggtcgaaacggccaggacgcagcagggccgggtcgagaacgtccggacggttagtcgcggcgataacgatgataccttcgttaccttcgaagccatccatctcaaccagcatctggttcagagtctgttcacgttcatcgtgaccaccgcccagaccagcgccacgctggcggcctacggcgtcgatttcatcgataaagatgatgcacggtgccgctttcttcgcctgttcgaacatgtcacgaacacgggatgcacccacaccgacgaacatttctacgaagtcagaaccggagatagtaaagaacggaactttcgcttcgcctgcaatcgctttcgccagcagcgttttaccggtacccggaggaccgaccatcaagacgcctttcgggatcttaccgccgagtttctggaagcggctcggctcgcgcagatactcaaccagttcagcaacttcttcttttgcttcgtcgcagcccgcaacgtcagcaaaggtcgttttgatctgatcttccgtcagcatgcgcgctttgctcttaccaaacgacatggcacctttgccaccgccgccctgcatttgacgcatgaagaagatccagacaccaatcagcaacagcatcgggaaccaggagatgaagatagaagccagcaggcttggttcttcaggcggttcaccgacaaccttgacgttcttggtcaacaggttatccagtaatttcggatcctgaaccggaatgtaagtggtataacggttactatctttcttggtaacgttgatttcacgtccgttgatacgcgcttcacgaacctggtcgttattgacctcttgtaggaaggtagagtaatccaccttacggccattagactcgctgggcccaaagctctggaatactgacatcagcacaacggcaatgaccagccagagtattaggtttttcgccatgtcactcaagggattaacctcttattacaactgtgttaaaaacagcgtcaggatactctatatccagcatctttcaaactttcgtctgaaatctcccggttagggtttacgcccggtcgctacaatatacacttcccgcgaacgtgcacgagaagagtccggcttacgaactttgaccttcgtaaacagggagcgaatttcccttagatactcatcgaaaccttcgccctggaacaccttcactacaaaactgccacctggcgctaatacatcacgacacatttctagcgccagttccaccagatacatggcacgggggatatccaccgccggtgttccgctcatgtttggtgccatatcggacatgacaacctggactttgctgtcgccaacgcgctccagcagtgctttcatcaccagttcatcacgaaaatcgccctgaagaaagtccacaccaacgataggatccataggtaaaagatcgcaagcgatgatgcggcctttgccgccaatttgggtgaccacatattgtgaccaaccacccggagcagcaccaaggtcgacaaccgtcattcccggtttaaagagtttgtcactttgctgtatttcatcaagtttaaaccaggcacgggaacgtaacccctttttctgtgcctgttgaacatatttatcgctaaagtgttcctgaagccagcggctggagctggcagaacgcttcttacctgtcatttaactttcccatggggataactcatcgtaaccaattgcgtaaatttttacgcgcctatttggtgatatatgggagatggcggtagaatgacccgttttcaatcccaacgtaagcaaaaaatacgatgaatctgagtactaaacaaaaacagcacctgaaaggtctggcacatccgctcaagccagttgttctgcttggcagtaatggtttgaccgaaggggtgctggccgagattgaacaagcgttagagcaccatgaactcatcaaggtgaaaatcgccaccgaagatcgcgaaactaaaaccttgatcgtggaagctatcgtgcgcgaaaccggcgcctgtaatgtacaggtcatcggtaaaacgctggtgctttatcgcccaactaaagaacgtaaaatctcgctgccacgctaagattatcctaaagttacacacatttgctgtgtaaaacgaggggttttccgcaggcaggagagcaaaatgccacgctctgttcgttgataaaaggccgcatagcggcctttttcctttctttacaatacatcaacatcttgagtattgggtaattcttacaggtattccaccttaattacttcaaattctacttcgccgcccggcgttttgatgaccacaacatcatcttcttctttgccgatcaggccacgagcaataggcgagtttacagaaatcaggttttgtttaaagtcagcttcgtcatcgccaacgatgcgataagtctgttcttcgtcagaatccagattcagcaccgttacggtagcaccaaaaataacgcgcccattgttgggcattttggtgacatcaatcacctgcgcgttcgacagcttggcttcgatgtctttaatacggccttcgcagaaaccctgctgttcacgagctgcgtggtattcggcgttttctttcaggtcgccatgctcacgcgcttccgcgatagcagcaatgatttcaggacggcgcacagatttcagaaaatccagctcttcgcgtaatttttcagcgccgcgtaaggtcatcggaatagcttgcatttgttatacctcttgaatattcctgatagggcaagtcttcacccaccccggctgttcggcctgcccggcataactccttaccgggaccagaagcaaaaaaataccgacccgggtacaagtcccaggtcagctacaattcacattttgatagtcattttaccctgaagttcccgaagggtcatcgtttactttatagggcgttgcgccgtagtatgacggctcgattccaggttgttagcgcgagattatgcgattttccagatttatcatcggattgaccagctgtatagcgttcagtgttcaggccgcaaatgttgatgagtacattactcaactccccgctggtgccaaccttgccctgatggtgcaaaaagtcggcgcgtcggcccccgctattgattaccacagtcagcagatggcgctgcctgccagtacccagaaagtgattactgcgctggcggcgttgattcaactcggccccgattttcgttttaccacgacgcttgaaaccaaaggcaatgtggaaaacggcgtacttaagggtgacttagtggcgcgatttggtgccgatccgacgttaaaacgtcaggatattcgcaatatggtcgcgactttgaaaaaatctggcgtcaaccaaatcgatggcaatgtgttgatagatacctccattttcgccagccacgataaagcccccggctggccatggaatgacatgacacaatgctttagcgctccgcctgccgccgccatagttgaccgcaactgtttctccgtctcgctctacagtgccccaaagcctggtgatatggcttttatacgcgtggcatcttattaccccgttacgatgttcagccaggtacgcaccctcccccgtggttctgccgaagcgcaatactgcgaactggatgtggtgccaggcgacctgaaccgctttacgctgacgggatgcctgccacaacgttctgagccgctcccgttggcttttgccgtgcaggatggagccagctatgccggtgcaattctgaaagatgagttaaaacaggcgggtatcacctggagcggaacactgctgcgccagactcaggttaacgaacctggaacggtagttgccagtaaacagtcggccccgctgcacgatctgcttaagattatgctgaaaaagtcggacaacatgatcgccgatacggttttccgcatgataggccatgcgcgcttcaatgtgcctggaacatggcgggccgggtcggacgccgtgcgtcagatcctgcgccagcaagccggtgtcgatattggaaacaccattattgccgatggttcagggctttcgcggcataacctgattgcccccgccaccatgatgcaggtgctgcaatacattgcccaacacgacaatgaacttaactttatctccatgctgccgctggcgggctatgacggctctttgcagtaccgtgcaggtctgcatcaggcgggcgtggatggaaaagtctcagcgaaaaccggttcgttgcagggggtatataacctggcgggattcattaccacagcgagcgggcaacgaatggcgtttgtgcaatatctttctggctatgcagtagaacctgcggatcagcgtaatcgccgtattccgttagtgcgttttgaaagccgtttgtataaagatatttatcagaacaattagtcaaaaagaaaccccggcacatggccggggcttcagattattgacaaagtgcgctttgtttatgccggatgcggcgtaaacgccttatccggcctacaaaatcgtgcaaattcaacatattgcaattctcttgtaggcctgataagcgtagcgcatcaggctgatttggcgtttatcatcagtgattaacgcttgtaaatgaactcaacgccttcttcgtcgtcttcgtcccagtcgtcatcccagtcttcatcatcctcttcagcaatctcttcaagctgctggcgatgataatcatcccacatgaattcgactttctctggctgtttcgcttcttcagcctgcacgaccgggttttcaatgataaaggtcatcacatcccagcagagatctttcacgcccagtccactcgccgcagagatcagataatatttatcttcccagcccagcgcctcagcgatcgctttcgctttctcttcggcttctaccttatccagcagatcgatcttgttgaacactaaccaacgcggtttcgtcgccagatcctggctgtatttttccagctcgctgataataatacgcgcgttttcaaccggatcggtgccgtcaatcggatcgatatcgatgaggtgcaacaggacgcggcaacgttccaggtgcttcaggaagcgaatgcccagacctgcgccttccgcagcgccttcaatcagtcctggaatatcggcaacaacgaagctcttttcgttgtccattcgtaccacacccagacttggcaccagagtggtaaacggataatccgccactttcggtttagccgccgataccgcacgaataaaggtcgatttacccgcgtttggcatccccaacataccgacgtcagccagcagcatcagctccagcagcagctcgcgcttatcgcccggcgtgccgttggttttctgccgcggtgtacggttaacggacgatttgaaacgggtattgcccagaccgtgccagccgcccttagcaaccagcagacgctgaccgtgtttggtcatatcgcccatggtttcaccagtaccctggtcgattacacgcgtacctaccggcactttaatcgtcacgtctttaccgcgcttaccggtacagtcgcggcttgcgccattctgaccgcgctctgcacggaaagatttttcaaaacgataatcgataagcgtgttcaggttctcgtcggcttccatccatacgtcaccaccatcaccgccgtcgccgccatccgggccgcctttcggaatatacttttcgcggcggaagctcacgcaaccattaccgccatcacctgcaacgaccagaatcgatgcttcatcaacaaacttcattttattctccgtaaatcattcgcctgcgcggggttgcgataccaccgttgtatgcttacgtaatccgccccaaatacgatgaccaatggcggaatacatcgcgcccgcaaccacgacaaacgcaccgagataacctaaaaggtttaacatcggtctggcgaagaaatcgggccaggccagtgataaaagatctgaaaaaaacagcgtaaacagtggggtgagcgtgatgatcgcgctcacctgcgctgcctgccagcgagccatcgcttccgccagggcgccatatcctaccaaggtattcagtccgcaaaaaattaaacatgcgagctgccagtggctaagctgcgctatcactccaggctttgccagagggaagagcgcaattgtacataaagtgtacagtaaaaacaggatctgcggtgaggccagccgacgcaataaaaccttttgcgccacgccataactcacccaaaccgtcgccgcaccgaccccaaagataactccccaggtgtaatcggtgagctttgtaaatatctcgaccagactggtgttaaaaaacatcaccaggccgctcaggagcatcaatgcccctacaacctgagtgctgcgcattttctctttgaggataaatacgctggcaaccatcatgccaactggcgagagttgcccaatcacctgcgaagcggtcggactcaggtattgcaaggatgagctgaacaggatgaagttcccaaacagcccggcggtcgccactgccaacaaaatcaaccagcgtggcttacgaaacacgcgtaatggcggcaacctcttcttcaccgcaagaatggcacccaggccaatactcgccatcaagaaacggtaaaacacgattgtcggaggttccatcacctccagcacctgcttcattgcgattggcaacgccccccagcaaattgctgtggtgagcgccaaaagaatgccaatgcctgcctgctgcttcataccgtattccctgcaaagcgcatttgcggattaacgtcgcaccatgcgcatttttaccggttatcgaatgtaaaaagccccgcaacgtgttgcggggctttcatccgttaccgggacgcgaaaaacttattcagcttcgatgctgataaatttacggtttttcgggcctttaacttcgaatttcactttaccgtctgctttagcaaacagagtgtggtcacgaccgcaacctacgttagcgccagcgtggaatttggtaccacgttgacgaacgatgatgctacccgccagaacggattcgccaccgaaacgcttaacgcccaggcgtttagcttctgaatcgcgaccgttacgtgtggagccgccagcctttttatgtgccatttgaaatctctcctcaggtcttaggcgctgatgccagtaattttcacatcagtgaaccactgacgatggccctgctgcttacgatagtgtttacgacgacgaaacttaacgattttaactttctcgccacgaccgtgagcaacaacttcagctttgattacgccgccatcaacgaaaggaacgccgattttgacttcttcaccgtttgcgatcatcagcacttcagcgaactcaacagtttcgccagttgcgatgtccagcttttccaggcgaacggtctgaccttcgcttactcggtgttgtttaccaccactttggaaaaccgcgtacatataaaactccgcttccgcgcacaccttttcaatgattcagagtgcgctataaatattcacaatagggcgcgaatattacgcaaaacgcacgcctttgacaagtgctacagtcaatacacgaagaaaaaaaacacaacttgtacggtaacgtttatctgtgccattttttcagtacaatcaccctatattcctaaccataaaccctaagttgcctttgttcacagtaaggtaatcggggcgaaaagcccggcttttgcgatgaatttagaaaaaatcaatgagttaaccgcgcaagatatggcgggtgttaatgcggcaatccttgagcagcttaattccgacgtccaactgatcaatcagttaggctattacatcgtcagcggcggcggtaaacgtattcgtccgatgattgctgtactggctgcacgagctgttggctatgagggaaatgcgcatgtcaccattgctgccctgatcgagtttatccacacggcgactctgctacacgacgacgttgtggatgaatcagatatgcgcaggggtaaagctaccgccaacgccgcatttggcaatgccgccagcgtgctggtaggcgattttatttatacccgcgctttccagatgatgaccagcctcggttcgctcaaagtgctggaagtcatgtcagaagccgtaaacgtcatcgcagaaggtgaagttctgcaactgatgaacgttaacgatccggacatcactgaagaaaactacatgcgcgttatctatagcaaaaccgcgcgtctgtttgaggctgccgcgcagtgttccgggattctggctggctgtacgccggaggaggagaaaggcctgcaggattatgggcgctatctcggcactgctttccagttgatcgacgatttactcgattacaatgccgatggcgaacagttaggtaaaaatgtcggcgacgatctgaacgaaggtaaaccgacgctgccgctgctgcatgcgatgcatcatggcacaccagaacaggcacagatgatccgtaccgccatcgaacagggtaacggtcgccatcttctggaaccggttctggaagcaatgaacgcttgtggatctcttgaatggacgcgtcagcgtgccgaggaagaagcagacaaagccatcgcagcgttacaggtgctcccggacaccccttggcgagaagcactcatcggcctcgcgcacatcgctgttcaacgcgatcgttaatcccctcccctcatcccgcgcagcgcgcgggatggttccagtaagttccataaaaacacttattcagctctataacacctgaaaaatagggatgtgcatctttatatattctgaatattcacactctttacaggaactttttagagcaataggccatcaggagtatagtgatgctcgacagaagaagtgttctgaatgaaagcgactaacttaaggagtgaggaaaaatggaaagtaatttcattgactggcatcccgctgacatcattgcgggtttgcgcaagaagggaacgtcaatggcggcggaatctcgcagaaatggtttgagttcctcaacgctggcgaatgcattatcgcgcccatggccgaaaggagagatgattattgcgaaagccctgggaactgacccctgggttatctggccatcacgctaccatgatccgcagacccatgagtttatcgacagaacgcagttgatgcgtagctacactaaaccgaaaaaatgagtggtctggcggtagccccgcgaacggggctgccagctctcagacgattattcgcctttcacacgctcaatatttgcacctaaagcgcgcagtttgtcttcaatgcgttcgtagccacgatcgatgtgataaatacgatcaaccaccgtcgtcccttccgcaatacagccagccagcaccaggcttgctgatgcacgcagatcggttgccataacctgtgcgccagaaagtttttcaacaccgtgacaaataacggtattgctttcgatttcggcgtgcgcgcccatacggctcagctctggcacatgcataaagcggttttcaaagaccgtttcggtgataaacccggtcccttctgccaccaggttcaacagcgtgaactgggcctgcatatcggtcgggaatgccggatgcggcgcggtacgtacgttaacagccttcggacgtttgccatgcatatccaggctaatccagtcttcgccgacttcgatgtccgctccagcgtcacgcagtttcgccagcacggcgtcgagagtatctggctgcgcgttacggcagataattttgccgcgagaaatcgccgccgccaccaggaaagtaccggtttcgatacgatccggcagaacgcgatagacaccgccgcctaaacgttccacaccttcgatgacgatacgatcggtgccctgaccgctaattttcgcacccagcgtaatcaggaagttcgcggtatcgacgatttccggttcacgcgctgcgttttcaataatcgtggtgccttccgccagggttgcagcacacatgatggtcaccgttgcgccaacgctgactttatccatcacgatatgtgcacctttcaaacgaccatcgacggaagctttaacgtaaccttcttccagtttgatggtcgcgcctaattgttcgaggccagaaatgtgtagatcaaccggacgcgcaccgatcgtacaaccgccaggtagtgaaacttgcccctgaccaaagcgcgctaccagcggccccagcgcccagatagaagcacgcatggttttaaccagatcgtaaggtgcgcagaatacattaacgtcgcgggcatcaatatgcacagaaccattacgttctactttcgcacccagctggcttagcagcttcattgatgtatcgacgtctttcagtttcgggacgttctggatctctaccggttcttccgccagtagtgcggcaaaaaggataggcagagcagcatttttagcgccggaaattgtgacttcgccctggagcttcgttggcccctgaacacgaaatttatccatttagtttgttctcagttaacaattcatatccgctaccggcgaatcgcccatagctcaaaagccgttcagtttgcgatcgcgcgcccactccgcaggggtatacgctttgatcgacacagcatgaatgcggttatccgcaatatattccatcagcggaccatagaccgtctgctgttttttaacccgactcatgccgtcaaacaactcacccacggcaataacctgaaagtggctgccatcgccggaaacgtggacttcctggagggagagagcgttcatcaacacgctctgaatttcattattttccatgggatcttcaatcatcagttaataaaccagcgaaacatcttagagcaaagttgcgctggcataaataagcaaaaagcctcgctgataaatcagacaaggctcgacttgcaggcaggtttgccggacaggcggttaacgccatatccggcctgaaaaaatttaacgaggcagaacatcagcaggcaaattatacaatttcgccagggtatacactttgtcgtttaccccctgaagcgtcacattgttgccctgctttttcgccagatcgataagatggagcagcagtgccagtccccccgtatccacgcgggagacacggctaagatcgatgcaggtaatccccttcaccgcttcctcacgcatttcccaaagcggtagcaaaacgtcctgatccagctctccggataacgccagcgtgtcacccgtctgcatccagctcagtgactcgctcattattttttctcttccagagtgattttctgttgagaaatcgatttcagttgcgcagtcaggccgtcgatacctttggtacgcagcagcgttccccactcgttttgtttggtggtgatcatactgacgccttcagcaatcatgtcgtaagcctgccaattgcccgtctgggagtttttacgccactggaagtccagacgcaccggcggacggccattcgggtcaataatggtaacgcgaataggcacaatggttttatcgcccagcggctgttctggcgcaatctgataggtttgaccgtgatacatcgccagcgcctgaccgtaagcctgcttcaggtactcacggaaagcggcaaagtaggcttcacgttgagcaggggtcgcactcttgtaatactggcccagcaccagcgcaccggcgtatttcacctgtacgtatggcagcagttcctgatcaacaatggtacgcagataatccgggttggcccgaatttgcggttgctcattcttcaggcgatcgaacgttttctgcgccgcctcgtccatcagcttatacggattggtctggtctgccgcggttgccgcactcagaggtgcaatcaccagcaaagcgaccatcattaaacgtttaaacatgcgtcggttctcctgaaattatttcgttgtacccacaggttcagtggtttcattattacctggcgcagcagctggcgcatcgccactattcttattgtcatcgcctttactaccgtaaaggaactgaccaatgagatcttccagcaccatcgcagacttagtgtcctgaattgtatcgccatccttcaggatagcagtccccagttccgggtcttcaaaaccgacgtttaatgccagatattgttcccccagcaggccggaagtacgaatgctcagcgaactggtatctggaatgtggttataacgttgttcaatttccagcgttacgcgcggcagataggttttcgggtccagcgtaatatccgccacccgacccacaacaacgccaccaatactgaccggagagcgcgctttcaggccgccaatgttatcgaacgtcgcataaagcgtgtaggtcggttcagtacgtatggacgtcacgttcgccgccttcaggcaaacaaacagcgccgccagcagtgctgctaataaaaagatacccacccaaatttcattttttttcgtttgcatgaactcaattcccaaacatcaatgcggtcagcacaaaatccagccccagaacagccagagacgagtggacaacggtgcgagtggttgcccggctaatcccggcagacgtcgggatggcgtcgtagccgttaaacaacgaaatccacgtcaccgtgatggcgaacaccacgctcttaatcagacagttgaccagatccatacgccagtcgacggcattttgcattgccgaccagaagaacccgctatcaatgcctttccaactgacgccgaccagagatccgccccagatccccacggcgacgaaaataaccgtcaacagtggtaatgaaataaccccagcccagaaacggggagaaataacccgacgcagcggatccaccgccatcatctccatactggagagttgctctgtagcgcgcatcaggccgatttctgcggttagcgccgaaccagcacgcccggcaaacaacaacgcggcaaccaccggccccagttcacgcagtagcgataacgccaccagcatacccagactggtttccgcactataagtggtcagaaccagataaccttgcagccccaacaccattccgatgaacacgccagaaaccacaataatcagcatcgacaggacgccgacattatagagctggcgcaccagcagcggcgcatgtttgcgaaattccggtttgccgaccagcgcattgaataacattaacccggcccgcccgaacgttctcagggttttaatccctttatgtccgagcgacgccagcgcatttaacagcatgagtggcttaactccctggtaaaagatcagcgtgataatcgccggcaggatagcggaacggaacaggcccgtcagctatcccgtccagaaactgacgtacgcgcggatcaggattcgcctgcaacgcctgggcactgccatgagcgacaatttttttgtccgccaggatccaggcgtgatccgcaatacttaacacttccggcacatcgtgagaaaccaccacacaagtcacgcccagcgcgctgttcagctcagaaatcagcttcaccagtacgcccatggtgatgggatcttgcccaacaaaaggttcatcaaacatgatgagatccggctccagcgcaatcgcacgcgccagcgctgcacgccgcgccatcccaccggaaagttcagaaggcattagtttagccgctccacgcagccccacggcctccagcttcatcatcaccgtactatgcaacaatggcgcgggaagttgggtatgttcgcgcagtggataggcgacgttgtcaaatacgttcatatcagtgaacaacgccccggactgaaataacatgctcatccgtttgcgcactgtatacaggcgcgaacgagacatcgccggaatattctcaccatcgaaaaggatctcaccatgatctggtgcgatttgcccgccaatcagacggagtagcgtcgttttaccgatgcccgatggccccatgatcgccgtgatcttccctcgcggcacggtcagggaaatattatcgaagatgcagcgattgccacgcgtaaaactgacatcgcgcatatcgactaaattcgccacagactgctccataattcacccttcgtcttgcgttgattttctaagcatggcgctcaatttaaccttgaacccaacatatttacagaatattacccgccgtggttagcgaaagctggcatttgttttactttttagccgcataaagtcaaaattaagcatccgttacggctttctgaaaatcttcagcggaccggcgagtatacctgaagaaaggacgttagatgcttttagctacggcactgttaattgttggtttacttttggtcgtttacagtgccgaccgcctggtttttgccgcgtctattctttgccgaacctttggcatcccgccgctgatcatcggcatgacggtggtcagtattggtacatcgttaccagaagtcatcgtctcgcttgccgcgtctctgcacgaacaacgcgatttagccgttggtacagccctcggctcaaacattatcaatatattgctgatcctcggtctggctgcgctggttcgtccttttaccgtccattctgatgttctacgccgtgaattacccttaatgttgttggtcagcgtggtggccggttccgtactctatgacggacaacttagtcgcagcgatggtatctttctcctctttctggctgtgctatggctgctgttcattgttaaacttgcacgtcaggctgaacgtcaggggactgacagcctgaccagagagcagcttgcagagctgccgcgtgacggcggattgcccgtcgcgtttttatggctcggcattgcgcttatcatcatgccagtggccacgcggatggtggttgataacgccacggtgctggcgaattactttgccatcagcgagttgacgatgggtctgacggcaattgctatcggaaccagcctgccggaactggcaaccgcaatagcgggggttcgcaaaggtgaaaacgacattgctgtcggaaatatcattggcgcaaacatttttaatattgtcatcgtgttgggtttacccgcgctgataacgccaggagagattgatccactggcgtacagtcgtgactacagcgtgatgttgctggtgagcattatttttgcgttgctgtgctggcggcgctccccgcaaccgggccgtggtgtaggggtattattaactggcggatttatcgtatggctggcgatgttgtactggttatcgccaatactcgttgaataactggaaacgcattatgtcgcacgtagagttacaaccgggttttgactttcagcaagcaggtaaagaagtcctggcgattgaacgtgaatgcctggcggagcttgatcaatacatcaatcagaatttcacgcttgcctgtgaaaagatgttctggtgtaaagggaaagttgtcgtcatggggatgggaaaatcggggcatattgggcgaaaaatggcggcaacgtttgccagcaccggtacaccttcatttttcgtccatcctggtgaagccgcgcatggtgatttaggcatggttaccccacaggatgtggtgattgctatctctaactctggtgaatccagcgaaatcacggccttaattccagtgcttaagcgtcttcacgtaccgttaatctgcatcaccggtcgcccggagagcagcatggcgcgcgccgcagatgtgcatctgtgtgttaaagtagcgaaagaagcctgtccgttagggctggcaccgaccagcagcaccaccgccacgctggttatgggcgatgccctcgctgtcgcgctgttaaaagcacgcggctttactgctgaagattttgcgctctcacacccaggcggcgcactgggtcgtaaacttctgctgcgcgtaaacgatattatgcatacgggcgatgagatcccgcatgttaagaaaacggccagtctgcgtgacgcgttgctggaagttacccgcaaaaatcttggtatgactgtcatttgcgatgacaatatgatgattgaaggcatctttaccgacggtgatttacgccgtgtcttcgatatgggcgtggatgttcgtcagttaagtattgccgatgtgatgacgccggggggaatacgtgtgcgccctggcattctggccgttgaggcactgaacttaatgcagtcccgccatatcacctccgtgatggttgccgatggcgaccatttactcggtgtgttacatatgcatgatttactgcgtgcaggcgtagtgtaaagattcaaggataaacaacaatgagcaaagcaggtgcgtcgcttgcgacctgttacggccctgtcagcgccgacgttatagcaaaagcagagaacattcgtctgctgatcctcgatgtcgatggcgtactgtcagatggcctgatttatatgggcaataatggcgaagagctgaaagcgttcaatgttcgtgacggttatggcattcgttgtgcgctcacctctgatattgaagtcgctatcattaccgggcgaaaggctaaactggtagaagatcgttgtgccacattggggatcactcacttgtatcaggggcagtcaaacaaactgatcgcctttagcgatctgctggaaaaactggcgattgccccggaaaatgtggcttatgtcggcgatgatctcatcgactggccggtaatggaaaaagtgggtttaagcgtcgccgtggccgatgcgcatccactgttgatcccgcgcgccgattacgtgacgcgcattgctggcggtcgtggcgcagtgcgcgaagtttgcgacttattactcctggcgcagggcaaactggatgaagccaaagggcaatcgatatgagtaaagccagacgttgggttatcattgtgctatcactggcggttctggtgatgatcggcattaatatggccgaaaaagacgataccgcccaggtggtcgtcaacaacaatgatcccacctataaaagcgagcatacggacacgctcgtctataacccagaaggggcactaagctatcgattgattgctcaacacgttgaatattattccgatcaggccgtttcgtggtttacgcagccggtacttaccacgtttgataaggataaaatcccgacatggtccgtaaaagcagataaagccaagctgaccaatgaccggatgctctatttatatggacacgttgaagtcaacgcacttgtgccagactctcaacttcgcagaatcacgacggataacgcgcagatcaatctggtgacgcaggatgttacctctgaagacctcgtcacgttatacggaacaacatttaactccagcggtctgaaaatgcgcggcaacttacgcagcaagaacgccgagctgattgaaaaggttagaacatcctatgaaattcaaaacaaacaaactcagccttaatcttgtgcttgccagctcacttctggccgccagcattccggcatttgccgtaaccggagacactgatcagccgatccacattgaatcggaccagcaatctcttgatatgcaaggcaacgtggttacctttaccggtaatgtcatcgtcacccagggcaccatcaaaattaatgccgacaaagtggtcgttacccgtccgggcggcgaacaaggtaaagaagtgattgacggctacggtaaaccggcaacgttctaccagatgcaggacaacggtaaacccgttgaaggtcacgcttcccagatgcactacgaactggcaaaagattttgtcgttctgacgggtaatgcttatctgcagcaggtcgatagcaacattaagggcgataagatcacttacctggtgaaagagcagaaaatgcaggctttcagcgacaaaggcaagcgcgtaacaaccgttctggtgccgtcgcagctgcaggacaaaaacaacaaaggccagaccccggcacagaagaagggtaattaattcgttatggcaacattaactgcaaagaaccttgcaaaagcctataaaggccgtcgcgtggtagaagacgtcagcctgaccgtcaactccggggaaattgtcggtctgctggggccaaacggtgccggtaagaccaccactttctacatggttgtaggcattgtgccgcgcgatgcgggcaacatcattattgatgatgacgatatcagtctgctgcctctgcatgcacgcgcgcgccgcggtatcggctatctgccacaggaagcctccattttccgtcgcctcagcgtttacgataacctgatggcggtactgcaaattcgtgacgacttgtctgctgaacaacgtgaagaccgcgcgaacgagctgatggaagagtttcacattgagcacctgcgtgacagcatggggcagtcactctccgggggtgaacgtcgccgtgtagaaattgcccgcgcactggctgcgaatccgaaatttattctgctcgacgaaccgtttgccggggttgacccgatctcggttatcgacattaaacgcatcattgagcacctgcgcgacagcggcctgggcgtgctgatcactgaccacaacgtgcgtgaaacactggcggtttgtgaacgcgcttatatcgtcagtcaggggcatttgatcgcccacggcacgcctacagaaatcttacaagacgaacacgttaagcgtgtataccttggggaagacttcagactctgatagggtagaagtttgcgacgttttagcaggagagtacgattctgaacatgaagcaaggtttgcaactcaggcttagccaacaactggcgatgacgccacagctccaacaggcaattcgtctgttgcagttgtcgacgctggaacttcagcaggagctacagcaggcgctggagagtaatccgctgcttgagcaaatcgacactcatgaagaaatcgacacccgcgaaacgcaagacagtgaaacgctggacaccgccgacgcgctcgaacaaaaagagatgccggaagagctgccgctcgatgccagttgggacaccatttacaccgctggtacaccatccggcaccagcggtgactacattgacgacgagctgccggtctaccagggcgaaacgacgcagaccttgcaggattacctgatgtggcaggttgagctgacaccgttttccgacactgaccgcgctattgctacctctatcgtcgatgccgttgatgaaaccggttatctgactgtcccgctggaagatattctcgaaagtataggcgatgaagagatcgacatcgacgaagttgaagccgtccttaagcggatccaacggtttgatccggtcggtgtggcggcaaaagatctgcgtgactgtctgctgatccaactctcccaattcgataagaccacgccgtggctggaagaggccagactgatcattagcgatcatctcgatctgttagccaatcacgacttccgcactttaatgcgcgtcacgcgtctgaaagaagatgtgctgaaagaagccgtcaatctgatccagtcgctcgatccgcgccccgggcagtcgatccagactggcgaacctgagtatgtcattccagatgtgctggtgcgtaagcataacggtcactggacggtagaactcaacagtgacagcattccgcgtctgcaaatcaaccagcactacgcctcgatgtgcaataacgcgcgcaacgatggtgacagccagtttatccgcagcaatctgcaggatgccaaatggttgatcaagagtctggaaagccgtaacgatacgctactgcgcgtgagtcgctgtatcgttgaacagcagcaagccttctttgagcaaggtgaagaatatatgaaaccgatggtactggccgatatcgcccaggctgtcgaaatgcatgaatcgacgatatctcgcgtgaccacgcaaaaatacctgcatagtccacgaggcatttttgaactgaagtatttcttttccagtcacgtcaataccgagggcggcggcgaagcttcctccacggcgattcgtgcgctggtgaagaaattaatcgcggcggaaaacccagcgaaaccgttgagcgacagcaagttaacctctttgctgtcggaacaaggtatcatggtggcacgccgcactgttgcgaagtaccgagagtctttatccattccgccgtcaaaccagcgtaaacaactcgtttgacccaaccgataaggaagacactatgcagctcaacattaccggaaataacgtcgagatcaccgaggcactgcgcgaatttgttacagccaaatttgccaaacttgagcaatattttgaccgaatcaaccaggtctatgttgttctgaaagtggagaaagtcacccacacctcagatgcaacactgcatgtaaacggtggtgaaattcatgccagcgcggaaggtcaggacatgtacgctgccattgatggcttaattgataagctggcacgccagttgaccaaacataaagataaactgaaacaacactaattgtccgggcaattagcatgtgcatggcggtctgttgtgcggcacaacgggccatttgtacggttaatgctccgagcctgttccactgtttgagtgggcaggttcttaggtgaaattatgacaaataatgatacaactctacagcttagcagtgttcttaacagggaatgtacgcgaagccgcgtccactgtcagagcaaaaaacgcgccctggaaatcatcagcgagctggcggcgaaacaacttagcctgccgcctcaggtggtttttgaagctatcctgacgcgggaaaaaatgggcagtaccggtatcggcaatggtattgccattccgcatggcaaactggaagaagatactctgcgcgccgttggcgttttcgttcagctcgaaacgcctatagctttcgatgccatcgacaaccaaccggtggacttactttttgccctgctggtgccggcagaccaaactaaaacgcacctgcatactctgtcgctggtggcgaaacgtctggcggacaaaaccatctgccgccgtttacgcgcagcccagagcgatgaagagctgtatcaaatcattacggataccgaaggtactccggatgaagcgtagttattcggtaatgtctcttttagacgttgtgaggagaaacagtacatggtactgatgatcgtcagcggacgttcaggttcaggtaaatctgtcgccctgcgtgcgctggaagatatgggtttttactgcgtggataaccttcccgtagtgttgttacccgatctggctcgaaccctggccgatcgcgagatttctgccgccgtcagcattgatgttcgtaatatgccggagtcaccagaaatattcgaacaggcgatgagtaacctgcctgacgctttctcaccgcaactcctgttcctggatgccgaccgtaataccttaattcgtcgttacagtgacacgcgccgactgcatccgctttccagcaaaaacctgtcgctggaaagtgctatcgacaaagaaagcgatttgctggagcctctgcgttcgcgagcggatctgattgtcgatacctcagaaatgtccgttcacgagctggctgaaatgctgcgtacccgtctgctgggtaaacgtgaacgcgaactgaccatggtctttgagtctttcggcttcaaacacggtatccctatcgatgcagattacgtctttgacgtgcgcttcttgccgaacccgcactgggatccgaaactgcgtccaatgacaggtcttgataaacctgtcgccgcgttcctcgaccgccacacagaagtacacaattttatctaccagacgcgaagctatcttgagctatggttacctatgctggaaaccaacaaccgtagctacttgacggtcgccattggttgtaccggcgggaagcaccgttcggtgtatattgcagagcaactggcagactacttccgctcgcgcggtaaaaacgtccagtcacgccatcgtacgctggaaaaacgtaaaccatgaccgtcaagcaaactgttgaaatcacaaacaagctgggcatgcatgcccggcctgcaatgaagctgtttgaattaatgcagggttttgacgctgaagtgctcttacgtaatgacgaaggcaccgaggctgaagccaacagcgttattgcgctgctgatgttggattctgccaaaggacggcagattgaagttgaagcgaccggtccacaggaagaggaagcactggccgccgttatcgccctctttaattctggttttgatgaagattaatcttcatcactttgacatacaactcccttcaaactccccccgacaataagaaaatcacgtactgaaatcgttctcaatcaacgtcatttgtacattttgtgcgcttttcactttcagaagaaccttaagaaaaccttaagaggcattgtttaggttttgtttaagttaatcgaccatactggagatcgtcagaaaatatttccaggagatggcatgattcgcttatctgaacaaagtcccctgggcaccggaagacatcggaaatgttatgcgcatccggaagatgcccaacgctgtatcaagattgtctaccatcgtggcgatggtggcgataaagagatccgccgtgagttaaagtactacgcgcatcttggtcgccggttaaaagactggagtggaataccgcgctatcacggtaccgttgagacggattgcggaaccggttatgtctacgatgtgattgcagattttgacggcaagccttccattacgctgaccgaatttgctgaacaatgccgttacgaagaagacattgcacaactgcgccagctactgaaacagctgaagcgttatttgcaggataaccgtatcgtgacgatgtcgctgaagccgcagaatatcctctgtcaccgcatcagtgagtcagaggttatcccggtcgtctgcgacaacattggtgaaagcacattgattccactggcgacctggtcgaagtggtgttgtctgcgtaagcaagagcggttatggaaacgatttatcgcccaaccggcgctggctattgccctgcagaaagatctgcaacctcgtgagagcaaaacgctggccctcacttcgcgcgaagcttaatccagctggtgttgttgcataaacggctcaccgcctaactgatacatctgccgtaaaatccacgcctgacggctacgcacgtagcccgatggcgaggagactttgaaacgaagtggattaggtaatacagctgccagtaatgcagcttccgaccgggtaagtttgctcgcgggtttgtggaaataacgttgtgccgcagcttcgacgccaaacacaccgtcgccaaattcggcgatattcaggtaaaccgtcaggatacgctttttgctccagaccgtttctatccccagcgttaatccggcttccagcccttttcgaacccagctacgcccatcccataaaaagagatttttggctgtctgttgagaaatcgttgaagcaccgcgaatacggttttcattgcgctcgttgtgcgccagggctttctcaatggaagcgacatcaaagccccagtgctcaggaaatttctgatcttctgcggcaatcaccgccagtcccatccacggcgagatttgatccatactgacccagtcagaatgtgccacgtaacgaaaattgccatgcagccaggcgctgacctgtcgctcgaccattaccgctgagaagggaacaggcgcaacgctaaacaacgcgatgcccccgccccagaaaacggcgaggacaaccattaaccgcaaaagaaaacggcgaacgaaactaaacaccgttaagcggcttttactcattcagccagaaccagcacgcgggaaaccagcttatcaatgccgctcgccgcttctgcaatgttctgcgccagcatatatgctggggtggtgacaatcttattgtcttcatcaaccacgatatcatcgacaggacacggcacatgctccgcgcccatctcttccagcacttctgcggtatcgatatcagtaccgatggtcaaacgcagcgggaaatcgaaaattttcggcagcatcgccggggcaatacacataaaaccaagcggttttccggcctgatgcatcgcttgtgccagcgcctttaattcacggtcaacggtgcattcgctaccaagactggcaaaattgcttaaattcttcgccgcgccaaacccccccggcacaatcaacgcatccagttcagcggcatcggcctgggccagaggacggatttcaccgcgcgttattcgtgccgcttcaatcagcacattgcgcgtttccgtcatcgcttcgccagttaaatggttgataacatcaacctgctgcttatccggtgcaaagcagaccgcctgcgcaccgctgcgtgaaatagctaacaacgtcaacaccgcttcatgaatttcagaaccgtcatagacgccgcatccgctcagaattacgccaattttcttcattgtgatcatcctttcgcaattgactgaaacacattaatttttttaataaaaatggtacgcatcacacatttaactgattcatgtaacaaatcatttaagttttgctatcttaactgcgtgcggcctgaaaaacagtgctgtgcccttgtaactcatcataataatttacggcgcagccaagatttccctggtgttggcgcagtattcgcgcaccccggtctagccggggtcattttttagtggcttttgccacccacgctttcagcacttctacgtcgtgacgccactcttctttcatctcttcaatccattcaccgacgttatcttcccaggccggaaggtcaggagactgaatttgctgacccagctgttgcagatggcgtaaccccactgaccccgccgcacctttaattttatgtccttcctcaacaatgccttttttatcctgcgccgtcagattcgactccagcacgctgacatagcccggcatcatcttctcaaacaccgctaacccgtcggtgatcagcttcggtcctacaagttcgagatactgttccagcatgggaatatcgagcaatgcttctgatttactgttctcttctgtcgtcaccgtactctcctcatcatcctgggtatcccagaatttcttgatcatcgcggttagcgccggaacagaaagcggcttactcagcacatcatccattccagcattgaggtactcttgtttgtctttcagcacgttagcggttaaggccaccagcggcggtaaatcctcgcgcggataacgtttcgtcagttcacgagagatatccagcccggtcatatctggcaactgaatatccagcaacaccaggtcgtattcgcccggtttaaacatctccagcgccgccttgccggtcatggcgacatcaacgctgttacctaatttttccagcacagaacgcgcaacaatcacgttcagttcaatgtcttccaccagcagcacattcagcgccggtaaaggcatatcgtcttcatcaaacgcatcatcgacctcttctgctaccgacggtgcgtggatcgtcaacgtaaaggttgaacctttgccctgttcgctggtaaccgtaatatcgccgcccatatttttcgccagacgacgagaaacggccagaccaataccggtgccggtggcaggtttaccgccatgactgtctttcacctggtaatacatggcgaaaattttatccagctcatcctgcggaatgccgataccagagtcttccacttcaaaatgcagcatatcgccttcatcgtagcgcacgcgcacggtaacctggccttgctgggtgaatttgacggcgttactgatgaggttccacaggatctgccgtaaacgcgtcccgtcggtaatgacctgatgcggtaatggcagcgtcggctccaggttaaagcgcaatcctttttgttgcgcctgcaatgcggagagattttccagatcggcaaggaagctggtgaaatcaaccggttgattatcaagctggaccttgcgccgttccatcttatccatgtcgataatatcgttaaagatattccccagcgtgacggccgaaacatggatggtcttgagatatttttcctgctcggcggtgagttcggtatccagcagaatgcggctcagaccgacgataccgttcagcggtgtacgcaattcgtgactgatggtggagataaacgtcgttttgtcgcggctggcccgttcaagcgcatcctgataccgcttacgctcggtaatgtcgcgaccaaagcccatcaaaccgtgacgtttacccacgcggtcgtagtacggcactttacggatttcaaagcaggctttgcgcccgtccgggtaatccagccactgttcataggtcagtgacacattatgacggaacactttttcatcggtttcaatgacttttgcggcggcttccggtgagtaaacatcagcaggtttcaggtgaaccagttgtttttcgctttttccggtcagcagctccatcgcgcggttacagccggaaaactctttatcttcgttacgataaaaaaccaggtcgggtgaagcatcaaggaaggaacgtaagaatgaggattgctgctcgagctgaatttgtgtctcttcgcgctctttgatttcaattttcagttggccgaaggtttcctgcagttctgcttccgctttttcacgaacggcaatttcctgatttagctgggcaatattatcttttaactgaacgttgaggctcaaatcgcgctcgcgcatctcctccagtttttgcaccagccgtgacagacgttgtcgtgactcctccagttgctcgacgaccaccgatagaaagtagaccgcccacggcgtaatcagcaaaccaaagaagatagaacgaataacatcaatgctttcgacctgaccatgcagcaccatggttaccgccatttgtaccacaatggcaagaacgacgagggccagcgccagcaacattgagaagcgcaccagacctaacttcatcatcaggtcaacataatactgcgccagcagacgaatttgcttcattagggaattccttcacgacaacctgccccaataatacccaattctgacagttacgttataaattgtgtgagaaatgcggaattcccctcaacgacctactccgttggaggtagccacggacgtcccagcgccgatccctgtacgccatgttcattcagatagcgatccagctcgaccattcccgtccatcgattttcgcaccacagcggagcaagcagcgtcgggcgacgggcgctggcggaaatgcggtggtagatcacttccggtggcgtatggcgaatcatttctccggcagtgagcgtgtaatcctccagttcaataccgttcaaacgccccgcttcccaggctttcgccataatgctgcctttcacaatatgcagcggatgcagctttatgccgtccacgccggtttcaaccactcgctccagcgtttgcaaacattcagcctgcccttcgccaggcaggccgacaattaagtgggaacacaccttcagcccgcgctgacgtgccagctgggttgtacgctgataacaggcaaaatcatggccgcggttgatgcgatgcagtgttttgtcgtgggcggtttgtagccccagctccagccacacttcgtaaccctggtccttatattcgcaaagcagatccagcaccgcatccggcacgcagtccgggcgggtacccacacacaaaccgacaatattggcctggctcaccgcctgctgatacatagaacgcagcacctgaacttccgcaaaggtgctggtatacgcctgaaagtaggccagatagcgtttagcgcggttaactaaattcgcctggtgcgccagttgctcggcaatggaacgatgctgctgcgcttcatcggcaaacgaggcaacattacagaatgtgcagccaccacgcccgatggtaccgtcacggttagggcagctaaaaccgccgtgcagcgtcagcttatgcaccttttgcccataacgacgggtgagatcaccaccaaacatattgactaatttctgtaactgcataatctgatagaccgcgccttgaaaagaggccaaagcctgccatttttagctcaattcggcgatgacctggatcaatcgtcccggcctgcttttatcaactgcataatcaatcaaaattaccgaaatttcatgcataatcacataaatcacttttgcttatcttgtgtcagatttttttatctcctgatggattttaggcaaaaacagtagcatgaaacgtcattaccaattaaggcagtataaaatgctggttttgtcgtcagttcaaggcaggataagggttaacacacctttatgacagtcaggaattgactgtttctctaacgacttcccttttagccttaaagataaaatccattttaatttcagtcatttaataaagaattttgcgctaaagcacatttctgtaccaataagcttgccatttgacctgtatcagctttcccgataagttggaaatccgctggaagctttctggatgagcagcctgctcatcatatttatgcagtaattgagatcccctcttcaccgtattaaccgatgcgaaaaggacaacaagggggcgaatgcgaggcgcgcgtatgacacgcaaaccccgtcgccacgctctttctgtgcccgtgcgcagcggttcggaagtggggttcccgcagagcctgggggaggttcacgatatgttgtacgataaatcccttgagagggataactgtggtttcggcctgatcgcccacatagaaggcgaacctagccacaaggtagtgcgtactgcaatacacgcactggcccgcatgcagcaccgtggcgcgattctcgccgatggtaaaaccggcgacggttgcggcttgctgttacaaaaaccggatcgcttttttcgcatcgttgcgcaggagcgcggctggcgtttagcaaaaaactacgctgtcgggatgctcttcctgaataaagatcctgaactcgccgctgccgcacgccgcatcgttgaagaagaactgcaacgcgaaaccttgtcgattgtgggctggcgtgatgtccccactaacgaaggcgtgctgggtgaaatcgccctctcctctctgccacgcattgagcaaatttttgtgaacgccccggcaggctggcgtccacgcgatatggagcgccgtctgtttatcgcccgccgccgcattgaaaagcgtctcgaagccgacaaagacttctacgtctgtagcctgtcgaatctggtgaacatctataaaggtctgtgtatgccgacggatctgccgcgcttttatctggatcttgcggacctgcgtctggaatcggccatttgcctgttccaccagcgcttctccactaacaccgtaccgcgctggccgctggcgcaaccgttccgctatctggcgcataacggtgaaatcaacaccatcaccggtaaccgccaatgggcgcgtgcgcgtacttataaattccagacaccgcttatccctgacctgcacgacgccgcaccgttcgtcaacgaaaccggctctgactccagttcgatggataacatgctggaactgctgctggcaggcgggatggatatcatccgcgccatgcgtctattagtaccacccgcctggcagaacaacccggatatggacccggaactgcgtgccttctttgactttaactccatgcatatggagccgtgggatggcccggcgggcatcgtgatgtccgacggtcgttttgccgcctgtaacctcgaccgtaacggtctgcgtccggcgcgctacgtcatcaccaaagataagctcatcacctgcgcctctgaagtcggtatctgggattaccagcctgacgaagtggtcgaaaaaggccgcgtcgggccaggcgaactgatggttatcgacacccgcagtgggcgtattctgcactcggcagaaaccgatgacgatctgaaaagccgccatccatataaagagtggatggagaaaaacgtccgccgactggtaccgtttgaagatctgcccgatgaagaagtgggtagccgcgaactggacgacgacacgcttgccagctaccagaaacagtttaactacagcgcggaagagctggactccgtaattcgcgtactgggcgaaaacggtcaggaagcggtcggttcgatgggcgatgataccccattcgccgtgctctccagtcagccgcgcattatttacgactacttccgccagcagtttgcccaggtgactaacccgccaatcgacccgctgcgtgaagcgcatgttatgtcgctcgccaccagtatcggtcgtgaaatgaacgtcttttgcgaagcagagggccaggcgcaccgtttaagctttaaatcgccgattctgctctactccgatttcaaacagctcacgacgatgaaagaggagcactaccgcgcagatacgctggatatcacctttgacgtcactaaaaccacgctcgaagcgacagtcaaagagctgtgcgacaaagccgaaaaaatggtacgtagcggcaccgtgctgctggtgctctccgaccggaatatcgctaaagatcgcctgccggttccagccccgatggcggttggcgcgatccagacccgtctggtcgatcaaagcctgcgttgcgatgccaacatcatcgtcgaaaccgccagcgcccgcgatccgcaccacttcgccgtgttgctgggcttcggcgcgacggctatttatccataccttgcctatgaaacgctgggccgcctggtagacacccatgcgattgccaaagattatcgtaccgtgatgctcaactaccgtaacggcatcaacaaaggcttgtacaaaatcatgtccaaaatgggcatctccaccatcgcctcttaccgctgctcgaaactgtttgaagcggtcggtctacacgatgatgtagtgggcctgtgcttccagggggcggtcagccgcattggtggagcaagctttgaagacttccagcaggatctgctgaatctgtcgaaacgtgcctggctggcgcgtaagcccatcagccagggcggtctgctgaaatacgtccacggcggcgaataccacgcctacaacccggacgtggtgcgcacgctgcaacaagcggtacaaagcggcgagtacagcgactatcaggaatacgcgaagctggttaatgagcgtccggcaaccacgctgcgcgatctgctggcaattacgccgggtgaaaacgcggtcaacattgctgatgttgaaccggcaagcgaactgtttaaacgctttgataccgccgcgatgtctatcggcgcgttaagcccggaagcccacgaggcgctggcggaagcgatgaacagcatcggcggtaattcgaactccggtgaaggcggcgaagacccggcgcgctacggcaccaacaaagtgtcgcgcatcaagcaggtggcttccggtcgctttggggttactccggcgtatctggtcaatgccgacgtcattcagattaaagtcgcccagggcgcgaagccaggcgaaggcggtcagttgccgggtgataaagtcacgccttacatcgccaaactgcgctattcggtgcccggagtgacgctgatctccccgccgccgcaccacgatatctactctatcgaggacttagcgcagctcattttcgacctcaagcaggttaacccgaaagcgatgatctccgtgaagctggtttccgaaccgggagtaggcaccatcgcgactggcgtggcaaaagcttatgcggacttgatcaccatcgcaggctatgacggcggcaccggcgcaagtccgctttcatcggtgaaatacgcaggctgtccgtgggagctggggcttgttgaaacccagcaggcgctggttgctaacggcttgcgtcacaagatccgtttgcaggtcgatggcggcctgaaaacgggtgtcgatatcatcaaggcggcgattctcggcgcagaaagcttcggcttcggcactggcccgatggtggcgctcggctgtaaatatctacgtatttgccatctgaacaactgcgcaacgggtgtagcaactcaggatgacaaactgcgtaagaaccactatcacggcctgccattcaaggtgacgaattactttgagtttatcgcccgtgaaacccgcgagctgatggcacagcttggcgtaacacgtctggtggatctgattggtcgcaccgacctgctgaaagagctggacggtttcaccgccaaacagcagaagctggcgctgtcgaagctgctggagactgccgaaccgcatccaggtaaggcactctactgcaccgaaaacaacccgccgtttgataacggcctgctgaacgcgcagttgctgcaacaggcgaaaccgtttgtcgatgagcgccagagcaaaaccttctggttcgatattcgcaacaccgaccgttctgtcggcgcgtcgctttcaggctatatcgcccagacgcacggcgatcaggggctggcagccgatcctatcaaagcgtacttcaacggcaccgcaggccagagcttcggcgtgtggaacgcgggcggcgtggaactgtacctgaccggtgatgccaacgactatgtcggtaaaggcatggcgggcggcttaatcgccattcgtcctccggttggttccgccttccgcagccatgaagcaagcattatcggcaacacctgcctgtatggcgcgaccggtggtcgtctgtatgccgcaggccgcgcgggtgaacgtttcggcgtgcgtaactccggtgctatcaccgtggtagaaggcattggcgacaacggttgtgaatatatgacgggtggtatcgtctgcattctgggtaaaaccggcgttaacttcggtgcgggcatgaccggcggtttcgcttacgttctcgatgaaagcggcgatttccgcaaacgcgttaacccggaactggtcgaggtcttaagcgttgacgctctggcgatccatgaagagcatctgcgtggtcttatcaccgagcatgtgcagcataccggctctcagcgcggtgaagagattctggcgaactggtcaaccttcgccactaaatttgcgctggttaaaccgaagtccagtgatgtaaaagcactgctgggtcaccgtagtcgtagcgcagctgagttgcgcgtgcaggcgcagtaaggggtagcaacaatgagtcagaatgtttatcaatttatcgacctgcagcgcgttgatccgccaaagaaaccgctgaagatccgcaaaattgagtttgttgaaatttacgagccgttttccgaaggccaggccaaagcgcaggctgaccgctgcctgtcgtgcggcaacccatactgcgagtggaaatgcccggtacacaactacatcccgaactggctgaagctcgccaacgaggggcgtatttttgaagcggcggaactgtcgcaccagaccaacaccctgccggaagtttgcggacgagtctgcccgcaagaccgtctgtgcgaaggttcctgcactctgaacgatgagtttggcgcggtgaccatcggcaacattgagcgctatatcaacgataaagcgttcgagatgggctggcgtccggatatgtctggtgtgaaacagaccggtaaaaaagtggcgattatcggcgcaggcccggcaggtctggcgtgtgcggatgtcctgacgcgtaacggcgtaaaagccgttgtcttcgaccgtcatccagaaattggcgggctgctgaccttcggtattccggccttcaagctggaaaaagaggtaatgacgcgtcgccgtgaaatcttcaccggcatgggtattgaattcaaactcaataccgaagtgggccgcgacgtacagctggacgatctgctgagtgattacgatgccgtgttccttggcgtcgggacttatcagtcaatgcgcggcgggctggaaaacgaagacgccgatggcgtgtacgcagcgctgccgttcctcatcgccaacaccaaacagttaatgggctttggtgaaacccgcgacgaaccgttcgtcagcatggaaggcaaacgcgtggtggtccttggcggtggcgacactgcgatggactgcgtgcgtacgtccgtgcgccagggagcgaagcacgttacctgtgcctatcgtcgtgatgaagagaacatgccgggttcccgccgcgaagtgaaaaacgcgcgggaagaaggcgtagagttcaaattcaacgtccagccgctgggtattgaagtgaacggtaacggcaaagtcagcggcgtaaaaatggtgcgtaccgaaatgggcgaaccggacgccaaaggccgtcgccgcgcggagatcgttgcaggttccgaacatatcgttccggcagatgcggtgatcatggcgtttggtttccgtccacacaacatggaatggctggcaaaacacagcgtcgagctggattcacaaggccgcatcatcgccccggaaggcagcgacaacgccttccagaccagcaacccgaaaatctttgctggcggcgatatcgtccgtggttccgatctggtggtgaccgctattgccgaaggtcgtaaggcggcagacggtattatgaactggctggaagtttaagcgaggtaacaatgaattcgccagactgtgtctggcgaatcaaattactgacgaagtgcgcgttgttttctggcaaatgcggcatgagcgtttgacctttcctataatagggataattttcaataaattgtgctttgttcaccaagtctgatgagtgaagcacatcaagcaatttctcatttacaatccgtctcaattacttgttaacacctctgacaataccgattctgcaagctattcagtcttttcattccatgtaaattgtctcgatattaatatacaaaatatgaatataaaaaaccaatatattatccttaattatctatatattttcctatttttcagcgcaaacattcatgtaatgaataattatcaccacaaaccacctcaccagcaccttattattcacatgatcgtaactataaaattcattaaataaatacatcccagcaagttggctatttctgaacgagttatttatttacattcacaaacagatatatatactgcttcagctttttattttaaaaaataaatttgttattaaggatatgttcatatgtttttcaaaaagaacctcacaacagctgctatttgtgcagcactttctgttgcagcattcagtgccatggcaacagattcaactgatacagaattaactatcatcggcgagtatacccctggtgcatgtaccccagttgttacgggcggcggcattgttgactatgggaaacatcataacagtgcgctgaatccgaccggtaaaagtaataaactggttcaactgggccgcaaaaacagcacattaaatataacctgcacagcaccaacgctaattgctgtaacctccaaggataaccgtcagtcgaccattgtagcgttaaacgacacatcctatattgaaaaagcttatgatactctcgtagatatgaagggaacgaaaaacgcctttggtttaggttctgcgcctaatggacaaaaaattggcgctgcatccattggtattgacaggtctaatggtgggattcacgcggcggacgatacaggtgaaattcctgtcgacctgattcaaactgaccactggtcagcagcgacccccacatggaaagcctcatctaatggcgcattctgctcgctgacaagttgctcagcaatcgagcgcggttattctgttgcaaaaacaggggaactgacacctgttgctattacagcggtcaccttcccgttactgattgatgctgcggtaaatgacaatactattcttggttctgatgaaacgatcaaactggatggtaacgtcactatcagcgttcagtatttataagaacttgtaatacagtttttatttttacgcattaaccagttagctataactcggacagattatgccctatgacatggtctgtcttaatcaatctcatcgcaaacagtgcataacatatattaacaatatgtttctgcgttatttatcattattacaggagttttaatttaaatgctcagacacattacattcactgtatttataacaacatcaatgaataccttagccacagggatggttcctgaaacatcagtattgctggttgatgaaaagcgtggtgaagctagtattaatattaagaatacagatgatcatccttcattgctttacaccaccattgttgatttgcctgaaagcaataaatcaattcgtttaatcccgactcagcccgttattcgtgttgaagccggtcaagtacaacaggttcgatttttacttcaggcgactgttcctctgcaatcagaagagctgaaacgcgtaacgttcgaaggtattccaccaaaagatgacaagagcagcagagttactgtttcaattcgtcaggatctacctgtactgatccacccggcttccctgccggaagagcgagagacctggaaattcctggaatggcgtaaaaatggcgaccaaattgagattagcaaccccagtaattatgtcgttcgtatgaccttacaatttaaaacgctcccttcaggaaaaacgggggctataaataagacctattttctaccacacaccagtacaactactgcattaacaaacgctacggatacaaaagtcgagttttacccagccagccgatatggttatcgcggtaataaatatgtcactgacttaaaataactttgcctggagcgacaaggatgttaaaaaaaacgttactggcctacaccattggttttgccttttctcccccagccaatgcagatggtatagagattgccgctgttgattttgatcgggaaacattaaaatcactaggtgtagatcctaatatatcgcattatttttcccgttcagcccgttttttgccaggtgaatattcactgatagtatcagtaaatggcgaaaaaaaaggcaacattgctacgcgctttgatgaaaatggcgacatttgtcttgatcaggcatttctgcaacaagccggtttaaaaattccttctgaagaaaaaaatggctgttacgactatatattgtcctacccgggtaccacaatcacaccattacctaaccaggaagcgttagatattatcgtttcaccacaggcgatcattcccatagggttggatctcacaaacgcagcaactggtggaacagctgcgctgctaaactactctctgatgagcagccgtgcagaattttctaatgggagttcggactactcccaggctgcacttgaaggcgggattaatattaatgactggatgttacgcagccatcagttccttacacaaacaaatggcacattcagtaaccagaactcgtcaacctaccttcaacgtacctttacagatcttaaaacactcatgcgagcaggtgaagttaacctcaataatagcgtgttggaaggagccagtatttacggtatcgaaatcgcaccggacaacgcattgcaaaccagcggcagtggtgtgcaagttactggtatagccaacacctctcaggctcgtgtcgagattcgtcaacaaggagttttaattcattccattctggttcctgcgggcgcattcactatccctgatgtacctgttcgcaatggtaatagtgatcttaatgtcaccgttgtcgaaacagacggtagttcgcacaactatattgttccctccaccctgtttaatcagcatgtagaaagcttccagggttatcgcttcgcgatagggcgggtagacgatgactatgacgaatcaccttgggtaattagtgcatcgagcggatggaatctgacacgctggagtgcaatgaacggcggcgttatcgtagcagaaaattatcaggcggcatcaatccggtcgagtctggttcccctgcccgatttaacagtgagcagccaaattagtacatcgcaggatacgaaagactcactgcaaggacagaaatatcgtcttgacgcgaactacaatctcccattttcacttgggctaacaaccagcctcactcgatctgatcgccattatcgcgaactgtctgaagcgattgatgatgattataccgatccgactaaaagcacttatgcgcttggtttaaactggtctaactccattctgggtggtttcaacatcagtggctataaaacatatagttacgacggtgacaatgactcaagcaaccttaatattaactggaacaaagcgttcaaacacgccacggtttccgtcaactggcagcatcaacttagtgcttcagaaaataatgaagacgatggtgatctgttctacgtcaacatcagtattccatttggcagatcaaacaccgccacactgtatactcgccatgacgatcataaaacccactatggtactggtgtcatgggagtcgtctcagatgagatgtcctactatgtgaatgctgaacgagatcacgacgaacgtgaaacgagcttgaacggcagtatcagttccaatctccattacacccaagtcagccttgccgcaggagcaagcggcagtgatagccgtacttacaacggtacgatgtcaggtggtattgccgtacatgatcagggagtgaccttttcaccgtggactatcaatgacactttcgccatcgcaaaaatggataacaatattgcaggtgtcagaattacatctcaggcaggcccagtatggacagattttcggggtaatgccgtcattccatcaatccagccgtggcgaacatcaggagttgagatcgataccgccagcttgccaaaaaatgtcgatatcggtaacggcacaaaaatgatcaaacaaggccgtggtgcagtagggaaagtcggattcagtgcgataacacaacgccgtgcattactcaatatcacactttccgacggcaaaaaactgcccagaggcgttgcgattgaagatagtgaaggcaactatctgacaacatcagtggatgacggtgttgtattcctcaataacatcaaaccggacatggtgctagatataaaagatgagcagcaatcatgccgtattcaccttacattcccagaagatgcaccaaaagatgtgttctatgagacagcaacaggagagtgccaatgaaacggataataacaggatgcctgctgctgaacttcgccatggccgctcaggcagagtgtaatatctccagtagcatacaaaatatcgactatggcaaacgaagtgctgccatgcgccaagttgaccggggtaaaacaacacaattagcagacagaacaatcacgctggtaatgcaatgcgatcaggacgctcatattcgtgttcagttgaataccgctaatatttccaacaacggatttggatttggcccgaatggttcattaaatctgatcgccagcgatgcattttcaggtagtaacaatctcgacctggcgttagccagtggcaaaaatgacaatccgggcagcacaggaacagcatcaattagggaaggtgcgaataagcggggaaattcttctcggctgactcagtcatttcatttcttcatgtttgagccgattttttctcccgtaaatgccttgaatcagcctatttagaccgtttcttcgccatttaaggcgttatccccagtttttagtgagatctctcccactgacgtatcatttggtccgcccgaaacaggttggccagcgtgaataacatcgccagttggttatcgtttttcagcaaccccttgtatctggctttcacgaagccgaactgtcgcttgatgatgcgaaatgggtgctccaccctggcccggatgctggctttcatgtattcgatgttgatggccgttttgttcttgcgtggatgctgtttcaaggttcttaccttgccggggcgctcggcgatcagccagtccacatccacctcggccagctcctcgcgctgtggcgccccttggtagccggcatcggctgagacaaattgctcctctccatgcagcagattacccagctgattgaggtcatgctcgttggccgcggtggtgaccaggctgtgggtcaggccactcttggcatcgacaccaatgtgggccttcatgccaaagtgccactgattgcctttcttggtctgatgcatctccggatcgcgttgctgctctttgttcttggtcgagctgggtgcctcaatgatggtggcatcgaccaaggtgccttgagtcatcatgacgcctgcttcggccagccagcgattgatggtcttgaacaattggcgggccagttgatgctgctccagcaggtggcggaaattcatgatggtggtgcggtccggcaaggcgctatccagggataaccgggcaaacagacgcatggaggcgatttcgtacagagcatcttccatcgcgccatcgctcaggttgtaccaatgctgcatgcagtgaatgcgtagcatggtttccagcggataaggtcgccggccattaccagccttggggtaaaacggctcgatgacttccaccatgttttgccatggcagaatctgctccatgcgggacaagaaaatctcttttctggtctgacggcgcttactgctgaattcactgtcggcgaaggtaagttgatgactcatgatgaaccctgttctatggctccagatgacaaacatgatctcatatcagggacttgttcgcaccttccttagtacttcccccaataattggctggtgtttatgcaaaatggtcaagaagtggtaattgatagcggtaaaagcgttagcctcacactgacaatggctccagcttttaaggatgaaggggaactaaccgacatgacagatattacaggcaatctgacggtcctggtggaggcaaaatgaacaatgtaaaattactgattgccggaagtgccttttttgccatgtcagcgcaagccgctgatagagtatcaattgacgttaaggtgactctggaagctgcagcttgtactccaatactaagcaacggcggagttgttaacttcggtagtcattcagtcaatagactttcaacgcagcactacacacagattggaacacgtaatattaatatgactataacttgcgaatccgctaccggcattgcgattaccgctcgtgatacacgaatggatagtatgaccaccggaaaagatagtgggggtcagagtggtgtaaaatataccttaaatggcggaggttatattagccagacaacgcgcttattcggcttagggaaaacaaaagataataaaaatatcggtagttatgccgtgttaattgatagcaacaacattagtgccagcaatggtagccagacgttagctgtatcaatagcaggtgcagatgccgtcataacagggcaaaaaagagcatggcaaacgctcaccgcttatccgcttgcagtcgatcaaagctattattacacctttgtaaaaccaggtgaaacaaccccaactcctgtaacgaacgccattataccgcttcaggtgagcgcatctatcgcgaatgatttaggcggttcagaaaaaatcgaacttgatgggaaagctgtgataagcgtagtctacttgtgataacaatgccggacaggagtactatcaggcattcgttttatacgatcggttaatgtttcaggaaagctcttcgcatatcttggggaaagtaaatgtaatacgctgttcttaattgttcagtgctcaccccccagagtatagctcattccattattcaacttagctccatataaagggacagataatggaatcgctctcagaaggaaccacagcaggctaccagcaaatccacgacggtattattcatctggtcgatagcgcccggacggaaacggtacgtagcgttaacgcgttaatgaccgcgacgtaccaggaaattggccgacgaattgtcgaatttgaacaaggtggcgaggccagggctgcgtatggtgcgcagctaatcaagcgactatcaaaggatttatgtctaaggtataagcgtgggttctctgcaaaaaacttacgccaaatgaggcttttttacctcttttttcaacatgttgaaattcaccagacaatgtctggcgaattaacaccattgggaattccgcagacaccgtctgcagaattcccatcggcaaagatttggcagacgctgtctgccaaatctttccccttgcccaggtccacctacgtccgtttactttccgttaaaaacgctgacgcccgcagcttttatgaaaaagagacgctccgctgtggctggtctgttcgccagctagagcggcaaattgcgacccagttttatgagcggacactactgtcacatgacaaatcagccatgctgcaacaacacgctcctgccgagacgcatattcttccgcaacaggcgatacgcgatccctttgtgctcgaatttctggaattgaaagatgaatattcagaatccgattttgaggaggcgctgatcaaccacctgatggatttcatgctggaacttggggatgattttgcctttgttggtcggcagcgaaggttacgcattgatgacaactggtttcgtgtcgatctgctgtttttccaccgccgtttacgctgcctgctaatcgtcgatctaaaagtgggcaaattcagctatagcgatgccggacagatgaatatgtatctcaactacgccaaagagcactggacgctaccggatgaaaatccgcccatcggtctggttctctgtgcagagaaaggagccggagaagcgcattatgctctggcaggtttgcctaacaccgttctggcaagcgaatataagatgcaactacctgatgagaaacgactcgcagatgaactcgttcgaacacaggcggtgctagaggaaggctatagacgccgttaatttcagcggtttcgaattctgcagacagtgtctgcagaatctttaaaacgaactaagttttaagccattaaatcagccttaaccttcaccacaacctttttaatctctccaggctcgccgacaacgcatcctggtttatgcggttcacctggcataaacacggcgaacattcccggttttaagatgatggcttgctcgttatcaatggtgctgcaaagctgataatcatcctcatggtggaactcttcacactgacgcgcagtgcctgccatgccaaacagaatccgttcctcaccgtttaataacagctggatatcaatgtattgctcgtgcaattccgcttttttctcgacgggcgattgagtgttaaacgtcatgacattcataaagatattgtcgccctgtaattcgtaacgacccggcgctttttcttgcggtctggcagctaatgccagcgttaacgcgtcctgtaacgcaggatgtaacccagcagacggtaatgactgtacttcacccatcatcataatttttctccctgggccaacagcgcagccccaagtaaacctgcatcatggcggtaatgcgccgccagtaaatcaacatgaaatgccgctggctcctgcgccagatacgtttccaccagcgccagatacccttctgccagaccaacgctgccaccgaccaccacgcactggcaatcagttgtggctttaatatcagcgatcagccttgcaagcgtacgtgcggagcggtgaatcagctgctgcgcctgctcgtcaccctgcccggcgcgcgtgaaaatagttttcgcatccgcgccagccaactccccctgcgctgccgctgcaatgccgcgaccagaagcaatcgcttccacgcaacctgtgcgtccacagccgcagactgggccgtgtggatcggcaagcgtatgcccgatatgccccgccagaccgccagggccggtaagcagtttgcagccgctcactacaccgccgccaacgccggtggaaacggtgataaagaccatatcggttatatcgccatccagcgcctgaaactccgcccatgctgcggcctgcgcgtcgttaatggcaatggtcggcaaattggtaagttgttccagcgttttgactaacggaaagtgtagcaatccaccaagattatgcggattaagcgccagcaagctgccgtcacggattatcccggtcgaagcgatggcaacccgctgcgcatgagcttgcaacggagagactaatgcggataaggcatcacgcaaggcttctggtgtctggctggctggcgtaggaagttcacgacgatcgcggatctgcccgtcagcgccaatcagcgcggcggcaagtttagtaccgccgatatcaatcgccagtgtggtcatagcaccgcctttttcatcgctgtgttgtaccactgacaaatgtgctcaagacgcgtgattgcagaaccgaccgtcaccgcccacgcgccgtggcgcatcgcatccgccgcctgagcaggcgtgttgtaacgcccttcggcaatcacccgacatccggcgtcgctcaacgttttcaccagcgccagatccggctcttctggcgtttcaggcgtggtatagccagaaagcgtagtgccaataatttcggctcccagcttttggcatgccaggccgtcttccggcgttgagcagtcggtcatcgccagtaaaccgtgatggtgaatacgtgccagcagcgtttcaacaggcaccggacgcgggcggtcggtgccgtcaatggcgataatgtccgcgcccgcctgcgccagcgcatcaacatcttcaatataggccgtgatgcgtaccggagaatcctccagatcgcgtttcacaattccaataatcggcacgctcaccaccgcacgcgtggcttgcagatttgccacaccttcaatgcgaatggcaaccgcgcccgcctgttctgccgctaatgccatggcggcgacgatttcgggtttatcgagcgggctgtccggaaccggctggcaggagacaatcaggccaccgttagcagcgattttttgatccagttgtgcaagtaacgacatacatcttcccttagcgaaaggcccggtacatagaccgggcaacaggattaacttttggttttgactaaatcgtttttggcgctgccaaacggcacggcaccgctgaatggtttaccgtcgatagcgtcatgagtacgcaacgcttccgggcgcaaccaacgctgaacgcgagaaggcatatccagcccaatcagcaggatcaccacgaacgtcagactgaacgagagcgatgccagcgcagtacccagatccagacgttgagcgatcaacgcgccgatgattggggccagtgcaccgcccaatgcgccaacgttgtaggtaaagcccaggcccgctgcacgctggtcggtatcgaaataaccgccaatcagttttggtaagatcccggcgatcccttgtccaagcatttgctggaagaacagtaacagaccgagcacccagacgtttgcgccgccaatcgcaaataccggaataatcagcagctgcgaggccagcaggctacaaacgtacgctttgcgggttcccagccagtcaccgaggaagccacctacgcagcatcccaccgccgcgccaaagccactaaagaacagcacattggctacagtatgcgggttataagccagatcggttttcagatacgttggcagcagcgcctgaatcggccatgagtagaggaaagcaaacaacacgaccaccatcagcattacgcccgttggccagcgtttgcctgcactctgcaccataaagctgataaagattgcggcgcataacagcccaagaacagcgacgatcgcggcattttgcaggttaccggcgaagcagaaccacagcgcagtagccgccgccagtgtcattacgatattggcaatgcgatgttcaccacggtagagaatatccaccattgtgcgtactggtgctttacctgcgtgtttctctttccagtcttccgcttccgggatgtttttacgcagccagagagcaaagatgattggcaaaatgccgataaagaacagcgcacgccagccccagaccggaaccaccaggctatagacctgagcggcaacgacggcccccacagagaagcctgaaatcaaaaaaccactggctttgttacgcagatgttttggccagctttcaatgacataggtggcgctggaaccgtattcacccgccatccccatgccgatgaccagacgagcgataaacatggtgatgtagcctggcgcaaagccgcaggccagcgtcccggccgagaagagaacgatgctggtgaccattgccagacgacgcccgtagcggtcacccatagcgccgagcatcaggccgccgaaccagcgagagataaaggctgcagagatcagacttgccgcctgcaccgtcgtcagcccgaattcaccttgtacttcggtgagtaccagggcgattaaaacgaaatcaaaaccgtcaagcagatatcccaaccaggcagcggaaaatgcgcgccattgtgcacggttgagatggcgataccacgggatattctgggttgtagtactcattgtgagtctcccgcggtgggcgatgcccacacgctttggtatgaaaattgtagggtacagatgcgtttatttcccctcacccggtaggggcgagcgaggggaaacaactcacccgcgctcttgcatcaactgctgggccagcgccttcagttctggcagatatttttcatctaccggtccaaacggtttgcggcacagcggcacagaaacgacatccatataatggaggacagttttcaggccgcggaatacgcccgttttgatcagtaaatcaatgactttattgcattcagtttgcagtttctgcgcggtctggatatcgccttctttcagcgccttaacgatcccctgatagcgccagcccatgatgttgtaggtactgccgataccaccatcagcgcccgccagcagaccagaggcgaagatttcgtcgtaaccgttatagagcacaagatcaggatgttcacgacggatctgctccatctgatagagatcgccagaggtctgtttcagcgcacctacgccaggcaatgtaacaagtgtgttgatctgatccagggtcagttttaccccactcagggctggaatgttgtacaccaccatcggcaaaccatccgccgaatcaataattgcccgatagtgatcgcagtgttcttcaaagctgaaaggatagtagaacggcgtgacggcggagacggcatcgaagccataacgtttagccgatgccgcaagttgttggctttcggcggtgctgacgcaaccgacgtgggcgatgagtttaatcttacctttcgcctcttcggcgacgatttccagtacctgttcacgctcggaaaggctttgtacaaaggcctcgccggtcgaaccacccacgtataaaccgtcgatgccctgctgaatattgaactgaaccaggcgacgcagactcgctttatccagtgcttgttgttggtcaaaaggagtcaggagtgcagccattacgccacgtaaattcgttgccataaatacctctgaagtgatgcttgtctgataaacgatatacctttatacctgttataccagatcaattaagcaacaccccatacagaaagcttataatgcgatctgcttcactaaagtggcattatttctttttgttggtggtctgaccgaaagcgtgccaggtagcagagacgctgttgagatgcgattgcaacgcacgatcggcttcgtcaggatcatgacggcggatcgcatcaacgatcgcaatatgctgttgataactaacgttgttatgttcgtgcagtgcctgatcggtaaccgttgggcgtgcggcaataagccagtcgagcagggcaacgtggatcgccatgaagattgggttaccggggatctccgccagcacgcggtggaaatcaacgtctgaacgaatgaatgccgcgttgttatccagcgactgactgttgatttccagtgcttttgccagcaaatcgatttgctcatcggtggcatgttcagccgcatagcgcaccagactggattcaaagaacagacgtaattgttcgaaatgggcaatcccaccgggatgagaaaggaaatctttcgccatgccggaaagctcaccgatgatagtgtccgcagaaggacgcgagacgcgagcgcgttcgccgttgtttatttgcaccagacctttgcgttttaacgctgccagcgcttcacgcaccgaaggacgcccgacgttaaagaacgccatcagttcgcgttcagacggtaattgttcaccttcgccaaattcacgacggcggatcatctgttccagctcttcttccaccatttcggagagttttttacgcgccagcgggcggctacgcaagttgcgaccaattgcaggtgaagaatcttcggtttgcgaatcaaatgcgttcataaggcccattctgtaaggtcagtgtgattaacatcatcagtgacatcctatcacaggattgaaagtaggggaaaatggcagggttttctctttgtgcctcatcattaccataattaacggaataattaactattgcgaaaaattaatgtaacgcagataaaaacatcccgtttgaattatttataagactattcacgagcattatgaatattatgaatgtgttcttacaaaataatcataagcgcatattttttaatgaaaaatcacctcacctacaattaaaaacacgacatccgcaccataaatagccttgcaaaaaatataacatcgttgttttcaatctgccgtttatgggattgaccgttttcttttgacacggagttcaacaatgttcggcataattatatctgtcatcgtattaattacgatgggctatttgatcctgaaaaactacaaacctcaggtggtgctggctgccgcaggtatcttcctgatgatgtgcggtgtctggttagggttcggtggtgtactcgatcccaccaaaagcagcggctacttgatcgtcgatatttataatgaaatcctgcgcatgctgtccaaccgcattgccggattggggctgtcgattatggcggtgggcggttatgcccgctacatggagcgcataggggccagtcgcgcgatggtgagcttgttaagccgcccgttaaaactcattcgctcgccgtatattattctgtcggcaacttacgtcatcggccaaatcatggcgcagtttattaccagcgcctccggtctgggtatgttgctgatggtcaccttatttccgacgctggtgagtctgggagtaagtcgtctctctgcggtggcagttatcgcaaccacgatgtccattgagtgggggattctggaaacgaactccatttttgctgcccaggtagcgggaatgaaaattgccacatacttcttccactaccagcttccggtcgcctcttgcgtcattatctcggtggcgatctcccactttttcgtgcaacgcgcttttgacaaaaaagataaaaatatcaatcacgaacaggcagagcaaaaagctctcgataatgtcccgccgctctattacgccattttacctgtgatgccgttaatcctgatgctcggctcgctgttcctcgcccacgtcgggctgatgcagtcagaactgcatctggtggtggtgatgttactgagtttgactgtgacgatgtttgttgagttcttccgcaagcataacttgcgcgaaacaatggacgatgtgcaggcgttttttgacggcatgggtacgcagtttgccaacgtggtaacgctggtggtcgcgggtgaaatatttgcgaaaggcttaacgacgattggcactgtcgatgcggttatcaggggggcggagcattctggtctgggcggtattggcgtgatgattattatggcgctggtcattgccatttgtgccattgtgatgggctctggcaatgcgccgtttatgtcatttgccagtcttattccgaatatcgcagccggactacatgtaccagcggttgtaatgattatgccgatgcattttgccacgacgctagcgcgcgcggtttcgccgattactgcggtggtggtcgttacgtcaggaattgcaggcgtttcgccttttgcggtggtgaagcggacagcgatccccatggcagtcggtttcgtggtgaatatgattgccacaatcacgctattttattaagtcattaaaaagacaaaacaggccgcctgggcctgttttgtattacttcacaacgcgtaatgccggtcgaccaccgcgtggtggctgcggaggttcatcgtcaggatgagtgtcatcatcgtgatctggcttgtcgccatcaataaccgacataacggtttcgttgtctgccgatgcctcttcatcattcatgatgctggtatcttcatcgtaggcagcttcaggctcaaacatcgtgcctgcgccattttcacgggcgtagatagccagcacggcagccagcggcacagaaacctgacgcggaatgccaccaaagcgcgcgttaaagcgcacctcatcattcgccagttccagattgccgacagcacgcggcgcaatgttgagtacgatttgcccgtcacgcgcatattccataggaacctgcacgccagggagcgtcacatccaccaccaggtgcggcgtgagctggttatccagcaaccactcatagaatgcacgcagcagatagggacgacgtggtgttagctgtgacaaatccatacagattaactccggcccagacgcatttcacgttctgcttcagttaaagaagcaaggaaagagtcacgctcaaagacgcgggtcatatagcctttcagctctttcgcacccgggccgctgaactcgatgcccagttgcggcagacgccacagcagcggagcaagatagcaatcgaccaggctgaactcatcgctcaggaagtacggcttctgaccgaagaccggcgcaatcgccagcagttcttcgcgcagttgcttacgtgcggcatctgcttcagaagctgaaccgttgatgatggtgttcatcagcgtgtaccagtctttttcgatgcgatgcatgtacagacggctttcaccgcgagctaccgggtaaacaggcatcagtggcggatgcgggaaacgctcatccagatattccataatgatgcgagattcccacagggtcagctcacgatccaccagggtcggaacgctctgattcgggttgaggtcaatcagatcctgaggcggattgtccttttccacgtgttcgatctcgaaacttacacctttctcagccagcacaatgcggacctgatggctatagatgtcagtaggaccggaaaacagcgtcattaccgaacgtttgttggcagcgacagccatgaaaacctccaggtatagtcagaatttttactgctaccagccaccaggtggccagtcagaagttgtgttacccaataaggaacgactctctttgttcgaaaatcaaacaaaaaatgagcaatacccgacatttgggcagaaaattggatgatagtttaccagattttgcgaccattgtggtgagtcgatgccggaaatggggaaaaagagatgcgctttagtctgaaatagttgacttagtcccttattggcgatgtggtttttgttttacctgtctgtcaggtggcagcaaaaagcaactttccagtttttacgctgattcagattttagctataaaaaaacccgccgaagcgggttttttcgaaaattgttttctgccggagcagaagccaattaacgtttggagaactgcggacgacgacgtgctttacgcagaccgactttcttacgttcaacctgacgagcgtcacgagtaacgaagccagctttacgcagttcagaacgcagggactcgtcgtattccatcagagcgcgggtgataccgtgacggatcgcaccagcctgaccagagataccaccacctttaacggtgatgtacaggtccagtttctcaaccatgtcgaccagttccagcggctgacgaactaccatgcgggcagtttcacgaccgaagtactgttccagagaacgttggttgattacgattttaccgttgcccggtttgatgaaaacgcgagctgcggaacttttgcggcgaccagtgccgtagtattgattttcagccattgcctataatcccgattagatgtcaagaacttgcggttgctgtgccgcgtggttgtgctcgttacccgcgtaaactttcagtttacggaacatagcacgacccagcgggccttttggcaacatgcctttaaccgcgatttcaatcacacgctcaggacggcgagcaatcatctcttcaaaggtcgcttgtttgataccaccgatgtggccggtgtggtgatagtacactttgtcagtacgcttgttgccggttacagcaactttgtcagcgttcagaacgatgatgtaatcaccggtatctacgtgcggagtgtattccgctttgtgcttaccgcgcaggcgacgagccagttcagtagccagacggcccagagttttaccggtcgcgtcaacaacataccagtcgcgttttacggtttctggtttagctgtaaaagttttcattaaaagcttacccaataaatagttacacgttggtgaacacccaaacgtcttcaattgttgaggttcacacgacaaagtccggcaaacctaccccttcgaatagcctatgccagcacacaaaaagttttgggaaaaaaactttcttgtaacgtggggtcgcaggattatagagaagtcggggtcaaagatcgacccctttttgtgatttgtgacaggttttaacccgccaaatgctcgcgcttcagatactcttcgctttgcatctcttgcagacgtgacaggcaacgctggaactcaaacttcagccgatcgccctgataaatttcatacagcggcacttctgcactcaccactaatttgacatggcgctcgtaaaactcatccaccagcgcaataaagcgccgcgcttcgctctccatcaaccgcgtcataactggtacatcaaacaacatgaccgtatgaaagagacgtgagagcgcaatatagtcatgctgactgcgggcgtcgacgcacagcgtagtaaaagagaccgccagcgtctggttctcgacgcccattgttgctaatggccgatggttgatttctaacgtcggtgaattttctcgtttcccccccgccagcgccaaccatagtttatccatttgcgcccgggtttcatcgtgaagtggcgaaagccacagatgcgcctgagtgagtgtacgcagacgataatcaacaccagcgtccacgttcattacatcacaatgctgtttaatggcatcgattgcaggcagaaaacgcgcacgttgcaggccatttcgataaagttcatccggcggaatatttgacgtcgctaccagggtaataccgcgagcgaacagggctttcatcagaccgccaagtagcatggcatcggtaatatcagaaacaaaaaattcgtcaaaacagagcacgtcagtttcggctttaaagcgatcggcaataatttccagcggatcggtctgcccctgtaaggcagttagctcttcatgcacccgcagcataaaacggtgaaagtgcaggcgctgtttccgctctcccggcaggctttgatagaaaaggtccatcagccaggttttcccgcgtcctacaccgccccacatatataagccacgcactggcgtatgctttgtgtcttcgcgtttaccccacagcttaccgacccgcgccattagcccactcgtcctgggggctggtggcgtgctattgatgagttcctgataaataatttccaggcggctgacggcctctttttgaacgtcgtcgggttgatggctgccttcattaagcgccttcaggtattgcgatgttggggtaacgctttgcatgatcttattgttattccttgaataatcggtgcgccgttgttcacggttgacgaaaaaaaggccgttctacactacgcgatatgcagtcgggattccacttctgtggaattaacggttatagtggcataatcagccgcaggcatggagcctgaagccaacaccctacggaaacaaaagacaacgggagatgttcatgacctgggaatatgcgctaattgggttagtcgtcggcatcattattggtgctgtggccatgcgttttggtaatcgtaaactacgccagcaacaggcgttgcagtacgaactggaaaagaataaagctgaactggacgagtatcgcgaagagctggttagccactttgcccgcagcgcggaattactggataccatggcgcacgactatcgccagctgtatcagcacatggcaaaaagctccagcagcctgctgccggaactgtctgctgaagcaaacccgttccgtaatcgtctggcagagtctgaagccagcaacgatcaggcaccggtgcagatgcctcgcgactattctgaaggcgcatccggcctgctgcgtactggcgcgaagcgcgactaatttatttttcgggcgcagccattgcgccctcctcttctctccctccccgactatcatttaatctggtgtctcattgttagccgtctgaaaattcaataacatcaaactgttttgaatctcttttcttatcattcaggtacgagagcaggaataatgaaaaaacaaacccagctgttgagtgcattagcgttaagtgtcgggttaactctctcggcgtcatttcaggccgtcgcgtcgattccaggccaggttgccgatcaggcccctctccccagtctggctccaatgctggaaaaagtgcttccggcagtggtgagcgtacgggtggaaggaacggccagtcagggacagaaaatcccggaagaattcaaaaagttttttggtgatgatttaccggatcaacctgcacaacccttcgaaggtttaggctccggtgtcatcatcaacgccagtaaaggctatgtgctgaccaacaaccatgtgattaatcaggcacagaaaatcagtattcagctcaatgatgggcgcgagtttgatgcaaaactgattggtagcgatgaccagagcgatatcgccctgttacaaattcaaaacccgagcaaattaacgcaaatcgctattgccgactccgataaattgcgcgtcggtgattttgccgtagcggtcggtaacccatttggccttgggcaaaccgccacctctggcattgtttccgcattaggccgcagcgggttgaatcttgaaggtctggaaaactttatccagacagatgcttccattaaccgcggtaactccggcggtgcactattaaaccttaacggtgagttaattggcatcaacactgcaatccttgcgcctggcggcgggagcgtcgggattggatttgccatccccagtaatatggcgcgaacactggcgcagcagcttatcgactttggtgaaatcaaacgcggtttgttaggcatcaaaggcaccgagatgagtgccgatatcgccaaagccttcaaccttgacgtgcagcgtggcgcgtttgtcagcgaagtgttgccaggttctggctcggcaaaagcgggcgtcaaagcgggcgatattattaccagcctcaacggcaaaccgctgaatagctttgctgagttgcgctctcgtatcgcgaccaccgagccgggcacgaaagtgaagcttggcctgctgcgtaacggcaaaccactggaagtagaagtgacgctcgataccagcacctcttcgtcggccagcgctgaaatgatcacgccagcgctggaaggtgcaacgttgagcgatggtcagctaaaagatggcggcaaaggtattaaaatcgatgaagttgtcaaaggaagcccagctgctcaggctggcttgcaaaaagacgatgtgatcattggcgtcaaccgcgatcgggtgaactcgattgctgaaatgcgtaaagtgctggcggcaaaaccggccatcatcgccctgcaaattgtacgcggcaatgaaagcatctatctgctgatgcgttaatgtcgtaaaccgggcatcaggcttacgtgtgatgtccggttaactcgtggtatgctgctgccgttcccttttttaatgacgcctccatcatgtttgtgaagctcttacgttccgttgcgattggattaattgtcggcgctattctgctggttgccatgccttcgctgcgcagccttaacccgctttccactccgcaatttgacagtaccgatgagacgcctgccagctataatctggcggttcgccgcgccgcgccagcggtggttaacgtttacaaccgtggtttgaacaccaactctcacaaccagcttgagatccgcaccctgggatccggtgtaatcatggatcaacgcggttatatcatcaccaataaacacgtcatcaacgacgccgatcagatcatcgtcgccttacaggatggacgtgtatttgaagcattgctggtgggatctgactctctaaccgatctggcggtacttaaaattaatgccactggcggtttacctaccattccaattaatgcacgtcgcgtaccgcacattggcgacgtagtactggcgatcggtaacccgtacaacctcgggcagaccattacccaggggattattagtgccacgggtcgaatcggtctgaacccgaccgggcggcaaaacttcctccaaaccgatgcttccattaaccacggtaactctggcggcgcgctggtgaactcgctgggcgaactgatgggcattaatacgctgtcgtttgataagagtaacgatggcgaaacgccggaaggtatcggctttgcgattcctttccagttagcaaccaaaattatggataagctgatccgcgatggtcgcgtgatccgcggctacattggtatcggcggacgtgagatcgcaccactgcacgcgcagggcggtggtatagatcaactgcaagggatcgtggttaatgaagtgtcacctgacggcccggcggcgaatgcgggtattcaggtcaacgatctgattatttcggtggataacaaaccggccatctctgctctggagacgatggatcaggtggcggaaattcgccctggttcggtgatccctgtagtagtgatgcgtgatgataagcagttaacgctgcaggtcaccattcaggaatatccggcaaccaattaagtcgtgcgctcaaaacaaaaaaccggagtctgtgctccggttttttattatccgctaatcaattacttattaacgaactcttcgcccagggcgatatctttcttcagcgtatccagcataccttccagcgcgttctgttcaaatgcgctcagggtaccgatagatttacgctcttccacgccgtttttacccagcagcagcggttgagagaagaaacgggcgtactgaccgtcgccttcaacgtaggcacattcgacaacgccttgttcgccctgcagtgcacgaaccagagacagaccaaaacgtgcagctgcctggcccatagacagggttgcagacccgccaccggccttcgcttcaaccacttcagtacccgcgttctggatgcgtttggtcagatcagccacttcctgctcggtaaaactaacgccaggaacctgtgacagcagcggcagaatggtaacaccagagtgaccgccaataaccggcacttcaacttcgcctggctgtttgcctttcagttccgcaacaaaggtgttggaacgaatgatatccagcgtggtaacgccgaacagtttgtttttgtcataaacaccggcttttttcagcacttcagcagcaattgcaactgtggtgttaaccgggttagtgataataccaatgcacgctttcgggcaggttttcgcaacttgctgtaccaggtttttcacgatgccggcgttaacgttaaacaggtcggaacgatccatacccggtttacgcgctacgcctgcagagataagaacgacatctgcgccttccagcgccggagtcgcatcttcaccagaaaaacctttgattttcacagcagtagggatatggctcagatcgacagccacaccgggagtcactggagcgatatcatacagagagagttctgaacctgaaggcagttgggtttttaacagtagtgcaagcgcctggccaataccgccagcagcgccgaggactgcgactttcatcctaaactccttattatattgataaactaagatatgttgctccgctgccgcgaccttaatccacaaaattgccgtttacaatgaccacatctcaagaatgtgtagtcacgcaagtttagcgtttatgcatttaattgccgtaatcaggaacctaacttacgtaattaacagtcgcttatgcattagcgcaacattccaacaggtggtgacaatataccctaccgttcagccaaaacaacatcaatttgataacaattaatttacttttaagcagaatttgcatgccgtgacgcaggcatgtttctcaataacgaaatttgataaaatcccgctctttcataacattatttcagccttcttcagggctgactgtttgcataaaaattcatctgtatgcacaataatgttgtatcaaccaccatatcgggtgacttatgcgaagctcggctaagcaagaagaactagttaaagcatttaaagcattacttaaagaagagaaatttagctcccagggcgaaatcgtcgccgcgttgcaggagcaaggctttgacaatattaatcagtctaaagtctcgcggatgttgaccaagtttggtgctgtacgtacacgcaatgccaaaatggaaatggtttactgcctgccagctgaactgggtgtaccaaccacctccagtccattgaagaatctggtgctggatatcgactacaacgatgcagttgtcgtgattcataccagccctggcgcggcgcagttaattgctcgcctgctggactcactgggcaaagcagaaggtattctgggcaccatcgctggcgatgacaccatctttaccacccctgctaacggtttcacagtcaaagacctgtacgaagcgattttagagctgttcgaccaggagctttaatctctgccccgtcgtttctgacggcggggaaaatgttgcttatccctctcaaccccctgctttcccctgcgattaatttaacgaatagtgcgttttactgcgacatgtcattcacacaatgaatacataaggtaaaaaaagcacattatgcaaaattcattatctaattgaaaaaactagaattaacgataaataaccgtatttttaattcttttttgttattaaaattcacatttttaacacttagtatcaactgaaacagttagcgcggtattaattagctcaataattagtgtatacttgattttgtgatatgggtcacgaaacaaaggcccagctaaaagattatgtcgaggtaaaaatcatgaaaatcaaaaccactgttgctgcattaagcgtactttctgttctctctttcggtgcattcgctgccgactccattgatgctgcacaagcacaaaatcgtgaagcaatcgggaccgtatccgtaagtggtgtggcgtcttcgccaatggatatgcgtgaaatgctgaacaaaaaagcggaagagaaaggcgcaacggcctaccagattactgaagctcgtagcggtgacacctggcacgctacggctgaactgtacaaataaaccctcatcgtcttgtccgacgatattgcccccggttcgggggcttttttttgcgctaatgacgaacattaaaacgcaaatgcccttccagctcttcctctgcctcatcaaacagcaatattaacgcgccaaaacggcgacgcgttttctctcccagatgaacaaattcaatctcaagtggtagcggcaggacatcgttcattaacacatcccatagtgagtcgagatcgcgtaccttatctttcgccagaccaaaggtttggctaaagtcacgataaaaatcctcctgactctcaatctcatcaaaatcaaaggtataaatattcatctgttgccaccgtcacgtttcgcggcgagttctgccgtgcatcgctaagtatagccatgaaaaaaccgacgcttttggcgtcggttttgacttaactatcggtcaacgcatgttgatacttatggagcatccccgccagccgatttaccggttccgtcacctgcggtggcgcttgccagatgcgtagcttttcctggtagatttccagttcttccagcaactggccaaagtaccgacgacgtttatcatcgctacgggcagatatcacatggtctgctgtgcggcgcatttgtcggtgaaacgccgataaatcctcgttaaccgggatcggtgcatcacgcaggcgctggtgcgcgataatcatcgtcagcgccaggcgaaatttcggcaaatcccctgggaacttattcatcagcaaaaacagctgctgataaagtgccgggaggtggttctctttacgacgtgccacattggtagtcatcgcggaaacagcggcagaaacaaactgattaagcagtacacgtccggtcctgtcgcgcgatttatcccgcaccagcaaaataacggtgaacgcgagcacacagccgacgatttgccctaatgcgctgtcgagaaactgactgaaatggaaagtcatcgggttatccagcacgataatatttatggtgctggccagtgcccccatcgagcccagtcgccgtttctgtacttctataccgaggaagaatcccagcactgccaggctaatgcacagcagcaacatgctctgttgggtattagggataatcaccaaaaagtagagcagccctaacggcagcgcggccagcgtcccgtagataaagtcgatcgccaccatgcgtggattcggcaaacgcattgccagtgacgtcactaccgcaatcatcaccattgcaccactgccggaagtccagcccgtccacagccagaaaagcgtgcccagaatgcaggaaagtgtggttcgccagaagttaaccattgcatgatgacgttcggctgactctacttttacttccggttcgccttgcaggatctcttcttcggtggcgttgatttttgtgttactgataacgccgcgcttgagaagctgataacgcgttgccgccgcgacccagctataaatggtgacaggcgtttcccgttccccggtccaggcgataactctccgcaggcgtttgagctgcttgtggacgtcctgcgcggtttctaccggcgtgtcaaaaaattcgcggaaagtatcagtgatcaattccgggcgcgtattctgaataagataagtttcgcaggattgggtaatcagcgtcagcgatagcgtattgatcgcttttaaacgtcgattggcccgcgcccagcgggaagattccatattcaggttgctgcgcatgccttgtagcgccgtggtgcgtcgcaccaggtcgccccaggctttatcgacaacttcaccatcgccatgcttgatacagagttgcattaattgatattgcgcgaccagcaaactttccagctctcgatccacttcttgtttgatcgatcgcggagaaaagagcaaatccgccataatcgcacacacaataccgataacgatctcgctacaacgttcgacggcaaactgcggcgtaagcaatggttccggctgaatggtgatcacaatgatcagcgcggtataaccggccagcccccacgcatacgagttttctattcgtaccagcgaggatatccaggtacaaaaaccggcccagatacagcacaccagaatcatcaataatggtgcgcggatcatcgcaatgatgatcaccagtccggcaatacagccaataaatgtgccgatgatgcgcaaaaagccacgatagcgaatagcgccagaatacggttcacctcccgcagcaaaggccgtaccggcggcaacaatcgccgctgtcagtaccgcccagcgtggcgtttccagctggaagtgaaagccaacaaacagcgccagtacaatggcggtcgccagttttaccgcaaagcgaatatgttggttagcaatggagaaaatacccatcgtgattaaccaaactcacgcaggcgatgggccattttacggaagaacgaatcctggctttcgtcgcgatcttgtttgccagtgaccaccactgtagcagtggtgcccgcaggccagatgttctcttgctggttgtcgagacgaatacgaaccggaacacgttgcgcaagacgcacccattcaaggttagagtctatagtcgccatccctttgtcgtcacgcgtgctgctggcgttggtgacccctgcggcaacactatcaacagtccctttcagcactttgttactgccaagcggcgtgatctctgcacgataccccggacgcaccccttccagcttagtttcttccatataggccagtacatagaaggagttctgtttcaccagcgcaaccgccgttgatcctcgagtaataaactcaccggtatagacgttgaggttggtcacccagccatctgctggcgcgcggatcaccgtgcgttcaagatccagttttgccagatcgcgggtcgcctgcgctttcgctaactgatgcagaaccgtttgtagtacgttgttggcctggtcgatctcttcgcgagacatcgcctgcacaccgagacggttacgacgtccggcctcctggcgtttctcctgtgccagtacctgataataagcaacatcggcttgcgcttcctcaagcgccttttgatagcgcggctggtcgatggtgaacagtatctgtccttttttcaccagctggttatcatgaacattcacctgggtaatgagtccagaaacgtccggcgcgatcgcaacgacgtcagcgctaaagcgcgcgtcacgcgtccagggggattcggtgtaatagacccaggcattaaaaattgcgatgaaggccagaatgactaatacgaccgtgatggccgtacgggagaattttcttattagtgttttcacttcaacctcaaacgaacagtcgcgatatcaaataaaacaagcagcaatagagcgcggtgttgaacaacgccggatgccagacaaagtcgtagatacctgttggcacaagtacccggcgcaccagccagaaaatcgccagtgataaaagcaattcaaaaaatatcggtgggaaggacagcccaaacaccacgataacgggaaacagactcatgttgaccttggttgtaaagagagagcaggcgttattattttcagcatctgtcgccgcagagaagggcatggaaagccgggcgagagcaacattgctgtagattgatatttaatatattagcgtaactgttatgctgttatctatattatgtgatctaaatcacttttaagtcagagtgaataatggaacgactaaaacgcatgtcggtgtttgccaaagtagttgaatttggctcttttaccgccgccgccagacagctacagatgagcgtttcgtccatcagtcagacggtatcaaaactggaagatgagttgcaggtaaagctgttaaaccgtagcacacgcagcattggcctgaccgaagccggtagaatttactaccagggctgccgtcgtatgcttcatgaagtgcaggatgttcatgagcaactgtatgccttcaataacacccccatcgggacgctacgcattggctgttcttcaactatggcacaaaatgttctcgccgggctgacagccaaaatgctgaaagaatacccaggtttgagcgtcaatctggttaccggaattccagcccccgacctgattgccgacggtctggatgtggtgatccgcgtcggcgcgttgcaggattccagcctgttttcccgccgtctgggcgcgatgccaatggtggtgtgcgccgcgaaaagctatctcacacaatacggcataccggaaaaacccgccgatttgagtagtcattcatggcttgaatacagcgtgcggcccgacaatgaatttgaactgatcgcaccggaagggatctcgactcgcctgatcccacaaggaagatttgtgactaatgatccgatgacgctggtgcgctggctgacggcgggtgccgggatcgcctacgtgccgctgatgtgggtgatcaacgagatcaatcgtggggagctggagatcctgctgccgcgttaccagtcagatccacgcccggtttatgcgttatataccgaaaaagataagctgccgctgaaggtacaggtcgtgatcaactcgctgacggattattttgttgaggtcggtaaattgtttcaggagatgcacgggcgcgggaaagagaagtaattcatattgtactgttacgttgtacaaacctgtgccaacgggttcccctcaccctaaccctcaccccaaaggggcgaggggaccgttcgtgcacgtagaaagattaattatccttctgaaaatagtgaaattattacgcagtaccgccaacagtcaggttatcgactttcaacgttggctggcccacgccaaccggcaaactttgcccttctttaccgcagacacccacgccgttatccagtttcaggtcgttgccaaccatcgaaatctgctgcatggtttcgataccggaaccaatcaacgttgcgcctttcaccggcttcgttactttaccgttttcaatcagatatgcttctgaagtggagaaaacgaatttgccggaggtgatatccacctgaccgccaccaaagttcggtgcatagataccgtactcaacggattcaataatttcctgcggggtcgatttacccggcagcatataggtgttggtcatacgcggcatgggcagatgggcgtaggattcacggcgaccgttgccagtcggcgtcatccccatcaaacgcgcgttgagtttatcctgcatgtagcctttcagaatgccgttctcaatcagcacgttgtactggcctggcgtaccttcgtcatcaatcgccaccgaacctcggcgatcgaccatcgtgccatcatcaaccacggtacacagttctgaagccaccagctccccgacctgtccactaaatactgaagtgccacggcggttgaagtcgccttccagaccgtgaccaaccgcttcatgcaacagcacgcccggccaacctgcgccaagtactaccggcatggtgcccgctggtgcagcaacggcagaaagattgaccagcgccatacgcactgcttcttttgcccatgcatccgcacggacttcgccgtcgagatcggcaaggaagaattcataaccaaaacgaccgccgccgccactggcaccgcgttcgcgtttgccatcttcttcgacgagaacgctcacggaaagacgcaccagcggacggacatccgccgctagcgtgccgtcggtggccgcaaccaaaattaattcatagacaccactgaggctggcagtcacttcctgtacgcgcttgtccgcttcgcgggcaaccttatcgacgcgacgcaggatatccagcttctcttcacggctcatgctttgcagcggatctaccgaggtatacaacgggctatgctctaccgcgcccagcgtctgtactttaccatcaccactatcacggacgatggtgcgcgccgcttgcgcactctgttccagcgccagcaggctgatttggtcagcgtaagcaaatccggttttttcaccgctgattgcacgcacaccaacgccctgatcgatgttgtaagaaccatctttaataatgcggtcttctaaaacccaggattcgtgatagctcgactgaaaatagagatcgccataatcaaggcgacgttcggccagttgaccgaggatcgcgaacaagtcctgatgtttcaggccgttcgccgctagcaattgttcacttaccaggttaagactcatcgtttttgctactcgttagttactgcagtagaggattttttacggctgccggatgcggcgtgaacgccctatccagcctacggttatgttccggtttgtaggcctgataagacgcacagcgtcgcatcaggcaacggctgtcggatgcggcgtaaacgccttatccgacctacggttatgttccgtttgtaggcctgataagacgcacagcgtcgcatcaggcaacggctgccggatgcggcgtaaacgccttatccgacctacggttatgttccgtttgtaggcctgataagacgcacagcgtcgcatcaggcaacggctgccggatgcggcgtgaacgccctatccgacctacggttatgttctggctcgttggcctttggcaacgattatcctatgagattggggcaattacgcgccctcgtcaaatcattgcgctttttctttacgcggttggcgcaacacttcgttgatttgcggatcgtccagcggacccgaaatgtgatagcgcaaaatggagactttgctccacagcggccccagcactttactggcggcaaacactgccgcgccaacaatggggttaaccgcaaaagccgcagccacgcccaccgtcgcagaaatctctggtgcgacaaccgcttccatattcaggtcgcgacgtaccagatttaccgaccctttcatggcgatatccgcctccaggccatccaccagcgtgtcgtcggtgtgcataacgccgtctttaatccacgcggtgctgcgaatggagtcaaaatagaacccttcgccaaaagtgtctctgaaatcaaaacgcagcttacgcatcagggcatctacgctcaataagcgcagcaattgcccggcatgtccggtattgatttcggtaatttcgcctttacccagttgagtatgaatgatgccattcaacgtcgcttcatctggctgccagggtgctttgcgccagtgtaaatcgtaatccacattaaatgacgactggcgtatgggcgtcgtgacaccaaaaaattctgcggcggcatcaattttctgcccgcgcagttttcctttcagcgaggtacgttcattccccggattattaacccattcaccatcggcagtaagccgcgagaaaccagtatcaatcagtccattggtcagcgttaacgtatcgccagaaatggtgatatcactgtcaatgcgaccgaatttttgcccccagaaccagcactctgtgcatcgtatttgggcgtccggccagccacggaagttaatgcgctccgttgtcgggaaaggtgatgacggcgttgaatcaccacgagttttcgccacgctcgggttgtaataaagatatttgatattcgccagccacggcgcgttattacgcatcgctagcgtggcgttgatttcacgcccttgcgcttcaaccagggtgccatttgccgtcggttgcgaaacaatactcaggttattccattgctgatttcccagtgacaacataggcgtacgtaacgttatgtgttgtgggaaactcgctgcaccaccgacactctccgcagcgcctttctggaacagggccagccactcggcaccattcatcggcggcatattgagttcaacgccactttgttccggcaacggcgggagcgttttactgtctgccgcccaaatagcacgatcgagcgtcagcttttgaccgagcaaccagcggctattgaaatgattatccgcaccagcctgtccggttaattcaaagctgttgagattgccatcaaccttaacgtttaccgctagtggttcacccgcaggtttggctaacggtgaaggtaagtgactgctcacattctttagatcgccgttcagctctatgttataggtcgcaccagcatgataaggcagatcaatgcccactttaccatcccacgccacgctgccactcaatgcttcgttcaccgcttcaggcagaacgccggttttcgccggttgccagttaccgttgaggtttaccgctacctggtaggcttttgccccttctttggtggaaaaatccacgttcaacggctgattaaaccagcttgctgtcagtggttcactttgcagatcgctattgataaagctgaatttaccgctcaaatttttcagggtgctgtcgagtggtttgataaacagactgttattacgcagcgtcacttcacctttcgcggttaccagttcgccgttcagcgggatatcaagatgtaagcgagcattcacatcgccgtcgagctggagttcttgcagggtcgcacccagagaatctttcagcggtgtctcatcaaagtaagggccaacggctttacccggacctttaatgtcagcgtcaatcagcagtttttcttttgagtagtcagggatcactgcggtaagattactcgcgcgcacgccgcccagattaacgccatcggttttcatccataaaccgtcgttaataaagtccagttcaatatcaaggttagttaatgcaggccagtccggctggaaggcaaacttcgcgttgcgcagcggcaccagcacttcaaactgaccttcgttgtgtttataggggaagagttgcggattgccaccataaaccagcgtcgcgttatccgcttcaccgccctgaatcgcgccacttaagtaatcaaccaggtctttacccatcaagttttccgggaaatagcgccaggcttgtgaaccatcatcggtactgatgccagccagaatacccagccagggttcatcgttagcaggttgcaggtaacgaaaaccgccgcgcgcatggacggctttggctttaacgtcaatattacgcccatccagctggaaacctttgttattgttcagccagcttatagttgcctggccgtcggcgatttctagtggcgcacggaataccgtttcgtaaggcatctttgcctgcttcatcgacgcggtaagcaaaccattttcaacgctgccggaaagcgtcccggagaagtgttccgcacccggtaataatttccattgcttccaggccagatcgctccacgatgcctgaaaacgggtcttgtctgccgcctgaagcgggatatccagcgccagagtgttaatcttgccgctcggttgtgtggagcgccaaacatcacccagtgcaggtgaaagtttcgcggccagcgggcgtatgccctccaggcctgccagctccagattactggcgcgaatccggagttcgtcactgcgtttattgtctttgccgccaacgtcctgttccggtatccaggccagcgtcaatgctccgctcggccagggtttgccgtccatcgtgatccgtgtatcgggaatagagaactgccagcccggattttcacgcgtaatatgcgcggtcagattatccaccgacagcgtatgcgtttgcttctcgcccaaccagctggcaccgccctgtttcagccagacgtcaccgccggttacatcgcctttgtcgatcgtcatccagccttcaagggagaactgtgccgtttccagcgcaatattgtcctgcatccatttaccgagccacggcttcaggtcgatgtcatccgcctggagccagacgcgaccattgcttaacaacccctcatcatcgcgcaaatccatgcgcacctgcatcacgccgtgctgtccggtaaggctggagaggcttaccaggccttccgcacggtgtcgacgtggatcgttcagccaggtgagttgtgggatcgccagctcggcgcgctgaccggatggcgtcaggaaactgacttcactgtcgcgaagatcgaaatggtcaaattgacgaagaaacagatcgctgatgtgactggcttccagactgtcatcactaccaccgctggtgataggagtgttggtgcgaaagcgcagctgccagaaagtgaggtcgcgaaactgccagcgcatatgtaacaggctctgccagacatccagcgccagagtaacgcgtttaaccgaaaattcgccgccatcttttagttctgcacggatgtcgtgtgcttcaagcgtcgggccaaaattctgccagctggctgagagctgactggcttctaccggcatgccagtcgcggattctattttgttgaggatttccggacgccaggcgtcaagatgcggtaaagcaatacgcaggccgctaaccagcagggcagcgatcacaacgagcgcggctccagtaagcagtaaaatccccggcaatcgcctcacccgtcactccttgtctgctaaaaatgtgactcaaaaaccctttgccggatggcggcccagcatctgtttacatcattacgacgtcaaactgctcctggttatagagcggttcaatttgtactttaacctgtttgccaacgaaaatttccacttccgccagcgagtgtgactcttcgcctttcaaggcttcagctactgccggagaagcatagaccaggaaacggtcggagtcgtaagcatggtggacacgaacaatctcgcgcatgatttcatagcataccgtttccacggttttcaccgttccgcgaccgtggcaggttgggcattcgttacacagtacgtgctcaatgctttcgcgggtgcgtttacgcgtcatctccaccagccccagcgccgaaaaaccattaacgctggttttcacccggtctttgctcaacgcctgctccagcgagtgcagcactcggcggcggtgatcttcattattcatatcgatgaaatcaataatgataatcccgcccagattacgcaaccgtaactggcgagcgatagcctgcgtcgcttcaatattggtattgaaaatggtgtcgtccagattgcgatgaccgacaaacgctccggtattgatgtccacggtggtcatcgcttcggtctggtcgataatgagataaccaccggatttcagttctactttgcgttccagcgctcgctggatttcgttttcgacatcaaagagatcgaaaatcggctggcgtcctgtgtaatgctccagcttgcttgtcatctcgggaatgtactccgaggtgaactcaagtaacgcttcgtaagtcaggcgtgagtcaacgcgaatgcggtccagttcggcatcggcgaaatcacgcagaacacgctgcgccagcgccagttcgccgtacagctgataacgggtctgcgggcgttttttacgctccataactttggtccagacgcgtttcagataagcggcatcggaggccagttcagcctcgccaaccccttccgctgcggtacggatgataaacccgccctgctcgtcgcaatactctgcgaccacttttttcaggcgttcacgttctgattcgctttcaatacgttgggaaaccccaacgtgagaagcccctggcataaacaccagatagcgagaagggagcgtgatatcggtggtcaggcgcgcacctttagtgccaagcggatctttcaccacctgcaccatcagatcttgcccctgacgaaccagttccgagatgtcgcgcaccgtgaattgcttttgttcttcacccgccacacattcggtgtgcggcatgatgtcggatgcatgaagaaacgcggctttatccagcccaatatctacaaaagccgcctgcatacccggaagtacacgacttacacgacccttgtagatattgcctactattccgcgtcgcgcctcacgttcaatatgaatttcctgcagaataccgccatcaatatacgccactcgcgtttccgaaggcgttacgtttactaacaattcagccgtcatgtttatcccttttctcacgcagtgcgttaaaattacttaataattcatacgtttcaaccagcggtaagccgactacggcgtgatagctgccatttatcttcctgacaaaacagccacccagcccctgaataccgtatgcacctgctttatctaacggttcatcgctggcgacatagcccgcgatgtcttcgtctgttaacgttctgaaagtcacatcggtgaccaccaggcaatcgagaatgtgctggctgtcggccaacgccactgctgtcatcacctgatgggtctgacccgataatttgcgcaacatctgcgccgcatgctctgcgtcgcgcggtttctccagcacttctccgttcaggataacgatagtatccgcacccagcaccgggagatccttcgccgtttgcgcgacacctgcccgtgctttctcgcgcgccagacgcacaacatactgctgcgcgctctcctgcggctgacgctgctcctcaatgcccgtaacaatacgttcaaaggtcacgccaagttgcgcaagtaactcctgacgacgcggagaaccggaagctaaatacagagaagtcatagaaacctttattgcactgcaaactgctgacggactttgcgcatcagcaagaaaatccacggccagagcaccccattgactacactactccagaacacttccggtctgaaagagacgttaatcactaaaaactctgcccagaaaacaataatatccaccaccagcgaaagcaacatgacgaccagcgcctgctgccataatgcgaggttgcggaaaagctggtatttcagcgccaccaggtaagcaatgatgctcatcgccaatacgcgtacgccaagcgtcgagccgctgatcagatccagtatggcacccatcacaaaacctgtgcccacatttacgcgatgaggcaaggccaggatccaatacaacaagatgagtaacacccagtttggccggaaaacaatcaggttatccggccagggcatgatttgcagcaacagcgcaatgaggaaagagagccagattacccagcgtccctggctacgatagctcgccactattgccctcccggcgcacgcgcaggcggttgagcaccactttgcggcggcgtagccctttgtggagagcgattagcagcaggctgtgtcggcgcagcaggcgcagtagctgcatttcctgtcgccggttgctgcggagtcggctgagcgatccccgttgccggttcaggtaactttggccccatcgcgtctggcgaaggcaatacctgcggcatcatctgcatcagacgttcattagcaacacgatgcacctcttccggcgtcatcgggttagcgccgttacgatctgccccccacagcagcagcagataacgcaaacgttgcagccctgcagtcggacgcgcctgaatcacagtataagcgcgctgggtatcgagttttacggaagagacaaccgcgaccggatagccttccgggaaacgaccgcccagaccggaagtcaccagcacatcaccaacacgaatatccgtattcgccggcagatgctcaagctgcaaatcatccgtacaaccgttaccggctgcaattacgcggatatcgttgcgcagcacctggattggcagcgcgtgggtcgcatcacaaatcagcagcacgcgactggtcagtttagcgacggccaccacctgaccaacaacacctttgtcgctgatgaccggctggccttcataaacgccattaacgctacctttatcgataacaacttgatcgctataaggatcgttaaccgtggagataacctgagtcaccattttctgctcatcctgacgcagcggggaacccagcagctcgcgcagacgcgcgttctcctgtttgtattgtccaagcatcagcagttcactgtttttcagcaacagttcctgacgtaacgcccggttttcaagttctaattggtcacgcgaggccagcgtctgcgatacgccatccagcaattcacgaggagcattggaaacaaagtagaaaggactgacggcggtatccatataagtacggatttgactgaacgtccccaggcggctgtcggcaataataatgccgagcgccaccagcaccgccagaataaggcgaatctgtagcgacgggccacggctaaaaattggcttcataagttatgcgtattctcgtatcagaccaggcagggtaaacagacacttcccctgcctgcatccgattactcttcgctgaacaggtcgccgccgtgcatgtcgatcatttccagcgctttgccgccaccgcgcgccacacaggtcagcgggtcttcagcaacaacgactggaatgccggtttcttccattaacaaacggtcaaggttacgcagcagtgcgccaccaccggtgagcaccatgccgcgctcggagatgtcggaagccagttccggcgggcactgttccagtgcaaccattaccgcgctcacaataccggtcagcggttcctgcagtgcttcgaggatttcattggagttcagggtaaaaccgcgtggaacaccttctgccaggttacggccacgaacttcgatttcacggacttcatcgcccggataagccgaaccgatttcgtgcttgatacgttctgcggtggcttcaccgatcagagaaccgtaattacgacgcacatagttgatgatagcttcgtcgaaacggtcaccaccaatgcgcacagaagaggagtaaaccacaccgttcaaggagataacagcaacttcagtggtaccaccaccgatatcaaccaccatagaaccggtcgcttcagaaaccggcaggccagcaccaattgcggcagccatcggttcttcaatcaggaagacttcacgggcaccagcgccctgcgcggattcacgaattgcgcggcgttcaacctgggtcgcgccaaccggcacacaaaccagaacgcgcgggcttggacgcataaagctgttgctgtgcacttgtttgatgaagtgctggagcattttttcagtcacgaagaagtcggcgataacgccgtctttcattgggcgaatggcagcaatattgcccggcgtacggcccagcatctgcttcgcgtcatgacctactgcagctacgcttttcggtgaaccggcacgatcctgacgaatggccaccacggaaggctcattcaatacgatgccttgtccttttacataaatgagggtattcgcagtacccaggtcaatggacaagtcattggaaaacatgccacgaaattttttcaacatactaagggataatcctgaaagctggggcggaaaagaaaatccgcttactttaccaaccacacgcagcagcgacaaggcgcaaaaatcatctgctacggtgaaaattagtgcagttcgtttcctttgttacaaatctctgcctgagtccagaaaggcttaatgcatcagcagcattcctcgcctgtttgcaaccgcgtaaggtcattcatctgcatatgtgctgcaacaatctggcgagcagacaagcacactcccatgagacgcagcgcgcattattctacgtgaaaacggattaaacggcaggttaaaccgagtatctttgtgaatattttttcacgttagtatcaagtggctgtgaggacgcgaaaaaatccccttgcccgcctgtaacaccgcgctgaatcagggtctgccactcgcttcgcgaacgcacgccggtggcgtaaacctgggtgctggtcccggagcaggcttccaccaggctttgaaccagcagctggttctccgttcgcttctcaatgtttctgaccagccccggatggagcttgagtaactcaacattaagttctttgatccaactggtacttaccagcgtcaaaccagcctggttgacggctacccgtacccctaaagcattcactaaacgaataacaggttgtaaacgactgatatgttgacctacatcggcctctgcaagttcaataattatgcgttttcgttgtgatttttcacattgcattaacgtatcgcgcagccaacgctgaaaacgcgggcgaatcagcgactcaacggtaacctgaatcgccagattttcctctggccagtaacgcaatagtggaataagacggctgatttgcagacggtcatactcttccgataagccaaactgcaagaccatcggcatatactccgccgagctaacctcttcattaccatcgaagatgcggcacatgagttcgcgatgatgaacctgaccttcgcgagtaaccgccggtttttgataaaggcgcgggccgccgcgactgagcatttgctcgataagcgtacgccagcgaacattaccgcgtcctttttcaggcaacgagtcatcgtaaatagcccagctattgccgccctgcaatcccgcattacgcgtggcagactctgcatgttccattacctgctcggtatcctgaccactacgccaggcgcagataccaatgtggatcatatcgtcgcgatcgagcattttattgttcggcaaggtatcaacggctttgattaactgaccggcgatgctctctgcctcttttaacgtccggtgcggtaacagcgcagcaaaatcactgcggtggtaacgcgccagcagtgcgccagggtagcgcatcataaatgtcgacagcagattcgtcagagtgaagaactgttcttcaacctggctgtgcccccaggtatcgctcaacatattgaaatccggcagacgaatcatcatcacgatcccgtgggtacctactttctcctgatcttccagtaacgttgctaactgattatcgaaaaagagtcggttattgaggccggttttcacgtcctgggcggcataagagcggatcagcgtatcaagacggctgtgttgttcgcgtgcgttctgaatttcacgaagcagcgtatccagcgcactgctggttctgggcggccattcatagatggttcccaacacattagagccacgctcaccgtttaagatacgagtagcccgggtttccagcaattcttgcccggcaagttgccgttgtaaccagcgtaccgccaggaagagcataacaatgataaagccaatcgcccccgtgagcggcgcggtggtcatcaacgaatggaaatagttgcccatcggatcctgataaaccagacgcaacgacatccccggatgctttatcaacggaacgctcagttcgcgaaacagatcgctggagccaactggacgataactaccatttctggccagggtataaacctgtttatcaccatggagcaggtctacacgaacgatatctgccgacatcattaattcggtaatttgtggccttaatacgctgaagtcattcgacacaaggtgggtatcaatcgccgtcgccaccgcctgaacgcgatgactaaacttatactgaatggcgttgtagaaacttagcgaacagcccagcaaagtcacaaaaattgttaacccggtgagcagcgtaacaaaggccgaaaatttcgtcgttaatctcatccttgtgttaactccgatagtgaggaagcgggcatactagcaaatcagatttatctcgcaatttattgcgcttcatcggctttgcttttccattagcgagtatagtcttcagaaattattttccaatccatcatgcacatgaggaccacttatgcaggcgttacttttagaacagcaggacggcaaaactctcgcatcagtacagactctggacgaaagtcgcctgccggagggcgatgtcacggtcgatgttcactggtcgagcctgaactataaagatgcgctggcgattaccggtaagggaaaaatcatccgtaattttccgatgattcctgggatcgattttgccggaactgtacgcaccagcgaagatccgcgttttcatgccggtcaggaggtgttactcactggctggggcgttggtgaaaaccactggggtgggctggcggagcaggcgcgagtgaaaggtgactggctggttgccatgccgcaagggctggacgcgcgtaaagcaatgattatcggtactgccggttttaccgccatgctgtgtgtgatggcgctggaagatgccggtgttcgcccgcaggacggggagattgtcgtgacgggtgccagtggtggcgtcggcagtaccgccgtggcgctgctgcataagttgggttatcaggtcgttgccgtttccggtcgcgaaagtacccatgaatatctgaaaagtttaggtgctagccgtgttctccctcgtgatgagtttgccgaatcccgtcctctggaaaaacaagtctgggctggggcaattgacaccgttggcgacaaagtgctggcaaaagtgctggcgcaaatgaattacggcggctgcgtggcggcctgtggtctggcgggtggttttactctgccaaccacggtcatgccatttattctgcgtaatgtccgtttgcaaggggtggattcagtaatgacgccaccagaacgccgcgcacaagcctggcagcgactggtcgccgatttaccggaatcattctatacccaggcggcaaaagagatatctctgtcagaggcaccgaactttgccgaggccatcattaataaccagatccagggtcgcacgctggtgaaggttaactaaccatttagcagggaataataagagagggaactcattttgaaatcattattcaatcggttaacgggaaaagcggttagccggacagctttcgtcgaacaccttggtcaggaagttatacaacatcatccaaactggaaagtcatgatttcgactgaccacaaattgatgcgcattgatactccactaaacagctattattgatacgcctccgtcgcctgttaggtttatgttgctttgcctgggcgacgctacgcttagccccttacttatttctggtaccatggggtgaataatctgattttgtttgactacaaattaatcactcgaacctatttaatgctgagcattgtcaatcggttaattttgcgtgctttagcattcacatctatccagacgatgcagtgaaaattgggtaatccccagcaaccgctgcgtaatgtcgtctatcttgtcgcgatcctggcatccctacattatttgtggtctgtgaagattatctcattgcagcccctcatcttcgcagggctggcttttcagcttttcaccttacgttataagaagttccgtcgatgatggcgctaatttcgtgaattgtgcggcttgttgcaaattacacggtgttgaaggttatttacatgttagctgttgattatcttccctgataagaccagtatttagctgccaattgctacgaaatcgttataatgtgcgacctcgtcctccctgacgcagtttttgcgctgcggaaaaggtgacattggcgcaacgaaggtatattttgttttttgccggaggatagcagcagatcgctgcacaatgtccgtcaagtctaacattgacactctggggcaaaatagaccggcgtcccggcctgctggaatttatcgctatgcatacagctgtcggggcatacgctttacagacggcggtgaaacgcctgtcacaatcacactaaacaaagagtacggaacccactcatggatattcgtaagattaaaaaactgatcgagctggttgaagaatcaggcatctccgaactggaaatttctgaaggcgaagagtcagtacgcattagccgtgcagctcctgccgcaagtttccctgtgatgcaacaagcttacgctgcaccaatgatgcagcagccagctcaatctaacgcagccgctccggcgaccgttccttccatggaagcgccagcagcagcggaaatcagtggtcacatcgtacgttccccgatggttggtactttctaccgcaccccaagcccggacgcaaaagcgttcatcgaagtgggtcagaaagtcaacgtgggcgataccctgtgcatcgttgaagccatgaaaatgatgaaccagatcgaagcggacaaatccggtaccgtgaaagcaattctggtcgaaagtggacaaccggtagaatttgacgagccgctggtcgtcatcgagtaacgaggcgaacatgctggataaaattgttattgccaaccgcggcgagattgcattgcgtattcttcgtgcctgtaaagaactgggcatcaagactgtcgctgtgcactccagcgcggatcgcgatctaaaacacgtattactggcagatgaaacggtctgtattggccctgctccgtcagtaaaaagttatctgaacatcccggcaatcatcagcgccgctgaaatcaccggcgcagtagcaatccatccgggttacggcttcctctccgagaacgccaactttgccgagcaggttgaacgctccggctttatcttcattggcccgaaagcagaaaccattcgcctgatgggcgacaaagtatccgcaatcgcggcgatgaaaaaagcgggcgtcccttgcgtaccgggttctgacggcccgctgggcgacgatatggataaaaaccgtgccattgctaaacgcattggttatccggtgattatcaaagcctccggcggcggcggcggtcgcggtatgcgcgtagtgcgcggcgacgctgaactggcacaatccatctccatgacccgtgcggaagcgaaagctgctttcagcaacgatatggtttacatggagaaatacctggaaaatcctcgccacgtcgagattcaggtactggctgacggtcagggcaacgctatctatctggcggaacgtgactgctccatgcaacgccgccaccagaaagtggtcgaagaagcgccagcaccgggcattaccccggaactgcgtcgctacatcggcgaacgttgcgctaaagcgtgtgttgatatcggctatcgcggtgcaggtactttcgagttcctgttcgaaaacggcgagttctatttcatcgaaatgaacacccgtattcaggtagaacacccggttacagaaatgatcaccggcgttgacctgatcaaagaacagctgcgtatcgctgccggtcaaccgctgtcgatcaagcaagaagaagttcacgttcgcggccatgcggtggaatgtcgtatcaacgccgaagatccgaacaccttcctgccaagtccgggcaaaatcacccgtttccacgcacctggcggttttggcgtacgttgggagtctcatatctacgcgggctacaccgtaccgccgtactatgactcaatgatcggtaagctgatttgctacggtgaaaaccgtgacgtggcgattgcccgcatgaagaatgcgctgcaggagctgatcatcgacggtatcaaaaccaacgttgatctgcagatccgcatcatgaatgacgagaacttccagcatggtggcactaacatccactatctggagaaaaaactcggtcttcaggaaaaataagactgctaaagcgtcaaaaggccggattttccggccttttttattactggggatcgacaacccccataaggtacaatccccgctttcttcacccatcagggacaaaaaatggacactcgttttgttcaggcccataaagaggcgcgctgggcgctggggctgacccttttgtatctggcagtttggttagtagccgcttacttatctggcgttgcccccggttttaccggctttccgcgctggtttgagatggcctgcatcctgacgccgctgctgtttattggactgtgctgggcgatggtgaaatttatctatcgcgatatcccactggaggatgacgatgcagcttgaagtaattctaccgctggtcgcctatctggtggtggtgttcggtatctcggtttatgcgatgcgtaaacggagcaccggcaccttccttaatgagtatttcctcggcagccgctctatgggcggtattgtgctggcgatgacgctcaccgcgacctatatcagtgccagttcgtttatcggcgggccaggagctgcttataaatacgggctgggctgggtattgctggcgatgattcagcttcctgcagtctggctttcactcggtattctcggcaagaagtttgcgattcttgcgcgccgctacaatgcagtgacgctgaacgatatgctgtttgcccgctaccagagtcgtcttctggtgtggctggcgagtttgagtttgctggttgcgttcgttggtgcgatgaccgtgcagtttatcggcggtgcgcgcctgctggaaaccgcggcgggtattccttatgaaaccgggctgctgatttttggtatcagcattgcgttatataccgcctttggtggctttcgcgccagcgtgctgaacgacaccatgcaagggcttgtgatgctgattggcaccgttgtgctgcttattggcgtagtacatgccgctggcggcttaagtaacgcagtacagaccttgcaaaccatcgatccgcaactggttacgccacaaggcgctgacgatattctgtcgcctgcctttatgacgtcgttctgggtactggtgtgttttggcgtgattggcctgccgcatactgcggtgcgctgtatctcttataaagacagcaaagccgtacatcgggggatcatcatcggtacgattgtggtcgcaattctgatgttcggtatgcacctggccggagcgttaggtcgggcggtgatccccgatctcaccgtaccggacctggtgatcccaacgttaatggtaaaagtgctgccaccgtttgctgccgggatcttcctggctgcaccgatggctgcgatcatgtcgacaattaacgcccaactgctgcaaagttccgctacgatcattaaagatctctatctgaatatccgtccggatcaaatgcaaaacgagacgcgtctgaagcggatgtcggcggtaattacgttagttctcggcgcgttgctgctgcttgccgcctggaagccgccagaaatgatcatctggctgaatttgttggccttcggtgggctggaagccgttttcctgtggccgctggtgctgggtctttactgggaacgcgccaacgccaaaggcgcgctaagtgcgatgatcgttggcggcgtgctgtatgccgtactcgcgacgctgaatattcagtacctgggcttccaccctatcgtgccctcgttactactaagtttgctggctttcctggtcggaaaccgtttcggtacatccgtcccgcaagctaccgttttgactactgataaataaagagttttgccatgccttggatccaactgaaactgaacaccaccggcgcgaacgcggaagatcttagcgatgcgctgatggaagcgggtgccgtttctatcacttttcaggatacccacgatacgccagtatttgaaccgctgccgggcgaaacgcgcctgtggggcgacaccgatgtgattggtctgttcgacgctgaaaccgatatgaacgacgtggtggcgattctggaaaaccatccgctgctcggcgcaggcttcgcgcataaaatcgaacaactagaagataaagactgggagcgcgaatggatggataatttccacccgatgcgctttggtgaacgactgtggatctgccctagctggcgtgatgtgccggacgaaaacgccgtcaacgtgatgttagatccagggctggcgtttggtacgggtacccatccaaccacctctctgtgcctgcaatggctcgacagcctcgatttaaccggtaaaacagtcatcgactttggctgtggttccggcattctggcgatcgcggcgctgaaactgggtgcagcaaaagccattggtattgatatcgatccgcaggcgattcaggccagccgcgataacgccgaacgtaatggcgtttctgaccgtctggaactctacttaccgaaagatcagccagaagaaatgaaagccgacgtggtggtcgctaacatccttgcaggcccattacgtgaactggcaccgttaatcagcgtcctgccggtttcaggcggtttgctgggcctttccggtattctggcaagccaggcagagagcgtttgtgaagcttatgccgatagcttcgcactggacccggtcgtggaaaaagaagagtggtgccgtattaccggtcgtaagaattaaccttcgcatcgccgtagggtgacgcggggcgaagtgcgagcaagctcacaaaaggcacgtaaatttgccgattatttacgcaaatttgcgtgccaaaattttcattcataaagaaaaattgagaacttactcaaatttctttgagtgtaaattttagtcactattttctaatatgatgatttttatgagtaattatcgcaccacgctcattttaaatgcaattctttgatccatctcagaggattggtcaaagtttggcctttcatctcgtgcaaaaaatgcgtaatatacgccgccttgcagtcacagtatggtcatttcttaactcatgcgcatcggacaatatcagctcagaaatcgcctgatcgcagcgcccatggctggcattacagacagaccttttcggacgttgtgctacgagatgggagccggattgacagtatccgagatgatgtcttctaacccacaggtttgggaaagcgacaaatctcgtttacggatggtgcacattgatgaacccggtattcgcaccgtgcaaattgctggtagcgatccgaaagaaatggcagatgcagcacgtattaacgtggaaagcggtgcccagattattgatatcaatatgggttgcccggctaaaaaagtgaatcgcaagctcgcaggttcagccctcttgcagtacccggatgtcgttaaatcgatccttaccgaggtcgtcaatgcagtggacgttcctgttaccctgaagattcgcaccggctgggcaccggaacaccgtaactgcgaagagattgcccaactggctgaagactgtggcattcaggctctgaccattcatggccgtacacgcgcctgtttgttcaatggagaagctgagtacgacagtattcgggcagttaagcagaaagtttccattccggttatcgcgaatggcgacattactgacccgcttaaagccagagctgtgctcgactatacaggggcggatgccctgatgataggccgcgcagctcagggaagaccctggatctttcgggaaatccagcattatctggacactggggagttgctgcccccgctgcctttggcagaggttaagcgcttgctttgcgcgcacgttcgggaactgcatgacttttatggtccggcaaaagggtaccgaattgcacgtaaacacgtttcctggtatctccaggaacacgctccaaatgaccagtttcggcgcacattcaacgccattgaggatgccagcgaacagctggaggcgttggaggcatacttcgaaaattttgcgtaaacagaaataaagagctgacagaactatgttcgaacaacgcgtaaattctgacgtactgaccgtttctaccgttaactctcaggatcaggtaacccaaaaacccctgcgtgactcggttaaacaggcactgaagaactattttgctcaactgaatggtcaggatgtgaatgacctctatgagctggtactggctgaagtagaacagcccctgttggacatggtgatgcaatacacccgtggtaaccagacccgtgctgcgctgatgatgggcatcaaccgtggtacgctgcgtaaaaaattgaaaaaatacggcatgaactaattcaggttagctaaatgcttgattaaaaaggcgctactcggcatggggaagcgccttttttataggtgtcacaaagggagtgaccatgagaacaggatgtgaaccgacccggtttggtaatgaagctaagaccattattcacggtgatgcgcttgccgaacttaaaaagatccccgccgaaagtgtcgatctgatctttgccgacccaccatataacatcggtaaaaattttgatggtctgatcgaagcctggaaagaagatctgtttatcgactggctgtttgaagtgattgcagagtgccaccgcgttctgaaaaagcagggcagcatgtacatcatgaacagtacggaaaacatgccctttatcgatctccagtgccgcaagctttttaccatcaaaagtcgcatcgtctggtcatatgacagttctggagtgcaggcgaaaaaacactacggctccatgtacgaacccatcctgatgatggtgaaagacgcaaagaactacacattcaacggtgatgctattctggtagaagccaaaaccggatcgcagcgcgcgttgatcgattatcgcaaaaatcctccacagccttacaatcatcaaaaagtaccgggtaacgtttgggattttccgcgcgtgcgttatttgatggatgaatatgaaaaccacccgacgcaaaaaccggaagccttactgaaacgcattattctcgcctcttccaacccaggcgatatcgttctcgacccgtttgctggtagctttactaccggtgccgtagccatcgccagcggacgaaaattcattggtattgagatcaacagcgagtacatcaaaatggggcttcgacggctggatgtcgcgtcgcattactctgcggaagaactggcgaaagtgaaaaaaagaaagaccggcaacctgtcaaaacgaagccggttaagcgaagttgaccccgatctcattacaaagtaaaggatgtgtaagcctggttttcagattattcatttcgtgtatatttcctgccagacttggttaaacatgcacaggctcaggtaatgattcgcaagtattggtggctcgtcgttttcgctgtcttcgtttttctgtttgatactttactgatgcagtggattgaactgctggcaacagaaacagacaaatgccgcaatatgaactcagttaatccactaaaactggttaactgtgacgaactgaattttcaggacagaatgtgaatttacatgacacttaattcattcgtttgatgaattaatttcgttatgttttcatctggcatgaacattcttaatacgttatcgaccagagcgggggcttgtttataaagatcataacccgccatattcattaaccagttttgaacaattccgctgaaggcaccatcaataataatcatcacaacatctaaatcgaggttatttgctacacaaccttgttgctgacacgcctgcaatacttcgcggagagtctgcggattaaagcccatcttttcgcgtatcactccctcggccagcatctcatcattaaattcacatttgtgatataagattttcagcaacgcctgctggcggggaattttggcaatatattgcaagccgacaatcaatttttcacgcaattgttgaaacgggtcatgctctaatccagccgtcaagtgttcctggattaactcccgcaatgaaggctgttgcaaccacatctcattaaacagttgagtcttgttttcgaagtgccagtagatagcgccacgcgtaacgttagcggcgtcggcaatgtcgttgagcgtcgtcttgcttacgccatgctgcgcaaactgggcgatggcagtttcaatcagttcttgccgggtcttcagagcttcggctttggttctttttgccatgattaattattcaggaaataaatatattcgacacagagtgagaaaatagcgaaggttaatctatcacctaatgtgtatttatacgagaggctaatattgagttgctataaatcgttaaataaataatatatattatttacctaagatacattcactacatcaatatatatttcaatttacgaggttttaattctgcctctttcaacccgcgtcaaaataaaacagtagaatattaatctttttttgtgtttatgtgccttgagatgcctgtattcataactattccttacatcgacgaatgataatttgtaggatagcgaactgtatttttctttctgcgagttaacgcgttgcctttttgggtaaataacgcgcttttggttttttgaggaatagtaatgacgaaacatgccaggtttttcctcctgccctcctttattctgatctccgcggctttaatcgccggttgtaacgataagggagaagagaaagctcacgtcggtgaaccgcaggttaccgttcatattgtaaaaacggccccgttagaagttaagactgaattaccaggccgcaccaatgcttatcgtatagccgaagttcgcccacaggttagcgggatcgtactgaatcgcaatttcactgaaggcagcgatgtgcaagcaggccagtccctgtaccagatcgatcccgcgacctatcaggcaaattatgacagcgcgaaaggcgaactggcgaaaagtgaagccgccgccgccatcgcgcatttgacggtaaaacgttacgttccgctcgtgggtacgaaatacatcagccagcaggagtacgaccaggccattgctgatgctcgtcaggccgatgccgccgtgattgccgcaaaagccacagtcgaaagcgctcgcatcaatcttgcttataccaaagtcactgcgccaattagcggacgtatcggcaaatcgactgtgaccgaaggcgctcttgtcactaatgggcaaacgactgaactggcgactgtccagcagctcgatcctatctacgttgatgtgacccaatccagcaacgattttatgaggctgaagcaatccgtagagcaaggaaatttgcataaggaaaacgccaccagcaacgtagagttggtcatggaaaacggtcaaacctatcccctgaaaggtacgctgcaattctccgatgtgaccgttgatgaaagcaccggctccataaccctacgtgctgtcttccctaacccgcaacatacgcttttgccgggtatgtttgtgcgtgcacggattgatgaaggcgtccaacctgacgccattcttatcccgcaacaaggcgttagccgcacaccgcgtggtgatgcaaccgtgctgattgttaacgataaaagtcaggttgaagcgcgccctgtcgttgccagtcaggcgattggcgataaatggttgattagtgaaggactgaaatctggcgatcaagtcattgtcagcggcctgcaaaaagcgcgtccgggagagcaggttaaagccactaccgatacccccgcagatactgcatcgaagtaaggtaatctgacatggcaaacttttttattcgacgaccgatatttgcatgaaattaataataaattctgatgatggcgggcgcactggcgatcctacaattgcccgtcgctcagtatccaacaattgcaccgcctgcggtttctgtttcagcaaactatccgggcgctgatgcgcagaccgtgcaggatacggtgacgcaggttatcgaacagaatatgaacggtatcgataacctgatgtatatgtcctccaccagcgattccgccggtagcgtgacaattacccttaccttccagtccgggaccgatcctgatatcgcgcaagtgcaggtgcagaacaaactccagctcgccacgccgttgctgccgcaggaggttcagcagcaggggatcagtgttgaaaagtccagtagcagctatttgatggtggcgggctttgtctctgataacccaggcaccacacaggacgatatctcggactatgtggcctctaacgttaaagatacgcttagccgtctgaatggcgtcggtgacgtacagcttttcggcgcacagtatgcgatgcgtatctggctggatgccgatctgctaaacaaatataaactgacaccggttgatgtgattaaccagttgaaggtacagaacgatcagatcgctgccggacagttgggcggaacgccagcgttaccagggcaacaattgaacgcctcgattattgctcagacgcggtttaaaaatccggaagaattcggcaaagtgaccctgcgcgtaaacagtgacggctcggtggtacgcctgaaagatgtcgcacgggttgaacttggcggtgaaaactataacgttatcgctcgtatcaacggaaaaccggcggcgggcctggggattaagctggcaaccggcgcgaatgctctcgataccgcgaaagccattaaggcaaaactggcggaattacagccattcttcccgcagggaatgaaggttctctacccttatgacaccacgccattcgtccagctttctattcacgaagtggtaaaaacgctgttcgaagccattatgctggtgttcctggtgatgtatctgttcttgcagaatatgcgagcaacgctgatccccaccattgcggtacccgtggtgttgttagggacgtttgccatcctcgccgcttttggttactccatcaacacactaacgatgttcgggatggtgcttgccatcgggctgctcgtcgatgatgcgatagtggtggtggagaacgtcgagcgcgtgatgatggaggataagctcccgccaaaagaagcgacggaaaaatcgatgtcgcaaattcagggcgcactggtgggtatcgcgatggtgctgtcagcggtatttattccgatggcattcttcggcggttctactggggcaatttatcgccagttctctatcaccatcgtttcggcaatggcgctttctgttctggtggcattgattcttacccctgcgttatgtgcaacgctgcttaaacccgtctctgctgagcatcacgaaaataagggcggtttcttcggttggtttaataccaccttcgatcatagcgttaaccactacaccaacagcgtcggcaaaatcctcggatccacaggacgatatttactgatctatgcgctgattgttgcaggaatggtggtgttgtttttacgtcttccgtcttccttcttacctgaagaggatcagggtgtctttctgaccatgattcagttacccgctggcgcgacgcaagagcggacgcaaaaagtgttggatcaagttacggattactatctgaagaacgagaaagcgaacgttgaaagtgtctttacggttaacggctttagcttcagcggccaggcacaaaacgccggtatggccttcgtcagtctgaaaccgtgggaagagcgtaatggtgacgaaaacagtgcggaagcggtaatccatcgtgccaaaatggaattgggcaagatccgcgacggttttgtcattccattcaatatgccagccattgttgaactgggcacggcaacgggtttcgactttgagttaattgatcaggctgggctgggtcacgatgccctaacccaggcccgtaaccagttgcttggtatggcggcgcaacatcctgccagcttagtcagcgtgcgccctaatggcctggaagacaccgcgcagtttaaactggaagttgaccaggaaaaggcgcaggcattaggtgtttcactttctgacatcaatcagaccatttcaacggcgctgggtgggacttacgttaacgacttcatcgaccgtggccgcgtgaaaaagttgtatgttcaggcggatgccaaattccgtatgctgccagaagatgtcgataaactttatgtccgcagcgccaacggcgaaatggtgccattctcggcctttaccacttcacattgggtgtatggctctccgcgactggaacgctacaacggtctgccgtcaatggagattcagggggaagccgcgccaggaaccagttccggcgatgccatggcgttgatggaaaaccttgcgtcaaaattacctgcgggcattggttatgactggacgggtatgtcgtatcaggaacgcttatcgggaaaccaggctcccgctctggtagcaatttcctttgtggttgttttcctgtgccttgctgcactctatgaaagctggtcaattcctgtctcggttatgttggtagtgccgttagggattgtcggcgtgctgctggcggcgacactctttaatcaaaaaaatgacgtctactttatggtgggcttgctaacgacaattggcttgtcggccaaaaacgctattttgatcgttgagttcgctaaagatctcatggagaaagagggtaaaggtgttgttgaagcgacactgatggcagtacgtatgcgtctgcgtcctatcctgatgacctctctcgcctttattctcggcgtattaccgctagctatcagtaacggtgccggcagtggcgcgcagaacgctgtgggtatcggggtaatgggaggaatggtctctgcaacgttgctggcaatcttcttcgtaccggtgttctttgtggtgatccgccgttgctttaaaggataaatcagaaacataaaggcgctttcgggtgcctttattatttccagtgaaacccataaaaattaataagatattcttctgctcactctttaaaagctttctatagttcccgctcccttcactatttttacaattcacataatttgtcattattcattccgcaagatttataacctccggtgataaaatggcattcagctcgttaataagagagttaacttattaagcgttagcgtttattactgaggtaacaccatgaaaagattaattcctgtggcattgctcaccgcattgctggcgggctgtgctcacgattcgccctgcgttccggtttatgacgatcagggtcgtctggttcacaccaatacctgtatgaaaggcacgactcaggataactgggaaacggctggggctattgccggcggggcagctgctgttgctggcctgacgatggggatcatcgctctatcgaaataactgaacagggcgcggagttccgcgctctttttaacgatacagtatctctccataagataaaatattgctatattctgctgggtaattccctgctgatttagcatgttacatcgcgttatttcgctgctttcgaaataacgcatcaatttaattttcacacttcccaccagaaatatactcacgctaacaatcattattctgcttagtaaaacacgcgtaaatattttgcgccaaaatgtggcgcatgtttcattttcgcaccattgcggggcgctgtttttattatttcctgtctacactcagcttattgcgacgcgaaatcgtgcgcaaaagctggcactacttttgcttataagaggatggccacagacaggtaaaagacgtttcccaaacgtcctataacgataattttcgcctcacaggaagcattatgaaaaagatgatgatagccacactggctgccgccagcgtgctgcttgccgttgcaaatcaggcgctgctggcgcgacgcttgatgccgttcagaaaaaaggttttgtgcaatgcgggatcagtgatggattacctgggttctcttatgccgatgctgacggtaagttttcaggtattgatgttgatatttgtcgtggtgttgccgctgctgtatttggtgacgacacgaaagtgaaatataccccgctcactgcaaaagaacgcttcaccgctttacagtcaggggaggtggatttgctctcccgtaatacgacctggacttcatctcgcgatgccgggatgggaatggcatttaccggcgtcacttattacgacggcattggcttcctgacgcacgataaagcggggctaaaaagcgcgaaagaactggatggcgctaccgtctgtattcaggcgggtactgataccgaactcaacgtcgccgactacttcaaggcaaacaatatgaagtacacaccggtgactttcgatcgctctgacgaatcagcgaaggcactggaatctggtcgctgcgatacgctggcctcggatcaatcacaactgtatgccctgcgcatcaaattaagcaacccagctgaatggattgtcttaccggaagttatctcaaaagaaccgcttggtccggtagttcgtcgtggcgatgatgaatggttctcgattgtacgctggacgcttttcgccatgctgaatgctgaagagatgggcatcaattcccagaacgtcgatgaaaaagcggctaatccagcaacgcctgatatggcacatctgctgggtaaagaaggcgattacggcaaggatctgaagctggataataaatgggcctataacatcatcaaacaggtgggtaactactcggaaatttttgagcgtaacgtaggttcagaaagcccgctgaaaattaaacgtgggcaaaataatctctggaataacggcggtattcagtacgcaccgcccgtgcgttaagtcggtgtgaggtaacgagcgtcgctacggcggcgctctcttcagcgttatgctttccgaggtttctatgtctcatcgccgctcaaccgttaaaggctcactctcttttgccaaccctacggttcgcgcctggttattccagatccttgccgttgttgctgttgtcggcattgttggttggttatttcacaacactgtaacgaatctcaataatcgtggcattacttcaggttttgcctttctggatcgcggcgctggcttcggtattgtccagcatttgatcgattaccagcagggcgacacctacggacgcgtttttattgtcggcttactcaatacgctactggtttctgcattgtgtattgtgttcgcttctgttttgggcttctttatcggtctggcgagactttcggataactggctgctacgaaagctttccacaatttatattgagatcttccgtaatattcccccgctgctgcaaatcttcttctggtactttgccgtgttgcgcaatttgcccggaccacgccaggctgtgagcgcgtttgatctggcctttttgagcaatcgtgggctttatattccgtcaccgcagctgggagacggatttattgcgtttatcctggctgttgttatggctatagtcctttctgttgggctattccgctttaataaaacataccagataaagaccggacaactgcgccgcacctggccgatcgccgcagtgttgatcattggtttgcctttactggcgcaatggctttttggcgcagcactacactgggatgtcccagccctacgaggctttaacttccgcggcgggatggttttaattcctgaactggcagccttaacgctggcactttcggtttatacatctgcatttatcgccgagattatccgcgctgggatccaggcagtgccttatggtcaacatgaagcggctcggtcactgggattacccaacccggttacgctacgccaggtcattattccccaggcattgcgggtgattattccaccgttaaccagccagtatctcaacatcgtcaaaaactcctctcttgccgccgctattggctatcccgatatggtttcgctgtttgccggcaccgtgctgaatcagacggggcaagccatcgagacgatagccatgaccatgtcggtctatctgattatcagcctgactatctcgctgctgatgaatatctataaccgccgcatcgcgatcgttgaacgctaaggagtcatgatgacaaaagtattgctgtctcatcccccgcgcccggcgagccataactcaagccgcgcgatggtgtgggtgcgaaaaaatctgttctccagctggagcaatagcctgctgactattggctgcatatggttgatgtgggaactgatcccaccgttgctgaactgggcatttttgcaggctaactgggttggctcaacgcgtgccgactgcacaaaagccggtgcctgttgggtcttcatccacgaacgatttggtcagtttatgtatgggctttacccacacgaccaacgctggcgaattaacctcgcattactgattgggcttgtgtcgatcgcaccaatgttctggaaaatactcccgcatcgcggtcgctatattgcggcctgggcggtgatttacccactgattgtctggtggctgatgtatggcggtttttttgctcttgagcgggttgaaacccggcaatggggcgggctgacgctaactttaattattgcatcagttgggattgcgggggcgctaccgtgggggatcttactggcgttaggtcgccgctcccatatgccgattgtgcgtatcttatcggtcatttttatcgaattctggcgcggcgtgccgctgattaccgttctgtttatgtcttcggtcatgctgccgttgtttatggcagaaggcaccagtatcgacaaattgatccgcgcgctggttggcgtgatcctgtttcagtcagcatatgttgcggaagtcgtgcgaggtggattacaggcgctgcctaaagggcaatatgaagcggcagagtcgctggcgttgggttactggaaaactcaggggctggttattctgccacaggcgttgaagctggtaattcctgggctggtaaataccatcatcgcactcttcaaagataccagcctggtgatcattatcgggttgttcgatcttttcagtagcgttcagcaggcaaccgttgatcccgcctggttgggtatgtcgacggaagggtatgttttcgccgcgctgatctactggatcttctgtttcagcatgtcgcgctatagccagtatctggaaaaacgttttaacaccgggcgtacaccgcattgaggacactatgagccaaattttactgcaacctgctaacgcgatgattacgctggaaaacgtcaataaatggtatggacaattccatgttttgaaaaatataaatttaaccgtgcaaccgggagaacggatcgttctgtgtggcccttcaggttccggtaaatcgacaaccattcgttgtattaatcatctggaagaacatcaacagggacggatcgtggtagatggcatcgaacttaatgaagatatccgcaatattgagcgcgtcaggcaggaagtgggaatggtctttcagcatttcaatctcttccctcatctgaccgttttacagaactgtaccctggcaccgatttgggtacgcaagatgcctaagaaagaggctgaagatctggcggtgcattacctagagcgggtgagaattgccgaacatgcgcataagtttcccggacagatttcaggtggtcagcagcaacgcgttgccattgcgcgttcgctgtgtatgaagccgaaaattatgttgtttgatgagccaacgtcggcgctcgatcctgagatggtgaaagaggtgctggatacgatgattgggctggcgcagtcgggtatgacaatgttgtgtgtaacacatgagatggggtttgcacgaaccgtcgctgaccgggtaatttttatggatcgtggggaaatagtggagcaagctgcacctgatgaattttttgcgcatcctaaatcagagcgtacgagggcatttttatcgcaggtaatccattaattgaatgttagttcgaaaagcaaaaaggccatcctttcggatggcctttcgcttgatttgatgtctggcagtttatggcgggcgtcctgcccgccaccctccgggccgttgcttcgcaacgttcaaatccgctcccggcggatttgtcctactcgggagagtgttcaccgacaaacaacagataaaacaaaaggcccagtcttccgactgagccttttgttttatttgatgtctggcagttccctactctcgcatggggagaccccacactaccatcggcgctacggcgtttcacttctgagttcggcatggggtcaggtgggaccaccgcgctactgccgccagacaaattcttttctaatctgccgaactttaacctaaaaagtggtgctgatacccagagtcgaactggggacctcacccttaccaagggtgcgctctaccaactgagccatatcagcacgctaaatttgatgcctggcagttccctactctcgcatggggagaccccacactaccatcggcgctacggcgtttcacttctgagttcggcatggggtcaggtgggaccaccgcgctacggccgccaggcaaattctgttttatcagaccgcttctgcgttctgatttaatctgtatcaggctgaaaatcttctctcatccgccaaaacagcttcggcgttgtaaggttaagcctcacggttcattagtaccggttagctcaacgcatcgctgcgcttacacacccggcctatcaacgtcgtcgtcttcaacgttccttcaggacccttaaagggtcagggagaactcatctcggggcaagtttcgtgcttagatgctttcagcacttatctcttccgcatttagctaccgggcagtgccattggcatgacaacccgaacaccagtgatgcgtccactccggtcctctcgtactaggagcagcccccctcagttctccagcgcccacggcagatagggaccgaactgtctcacgacgttctaaacccagctcgcgtaccactttaaatggcgaacagccatacccttgggacctacttcagccccaggatgtgatgagccgacatcgaggtgccaaacaccgccgtcgatatgaactcttgggcggtatcagcctgttatccccggagtaccttttatccgttgagcgatggcccttccattcagaaccaccggatcactatgacctgctttcgcacctgctcgcgccgtcacgctcgcagtcaagctggcttatgccattgcactaacctcctgatgtccgaccaggattagccaaccttcgtgctcctccgttactctttaggaggagaccgccccagtcaaactacccaccagacactgtccgcaacccggattacgggtcaacgttagaacatcaaacattaaagggtggtatttcaaggtcggctccatgcagactggcgtccacacttctaagcctcccacctatcctacacatcaaggctcaatgttcagtgtcaagctatagtaaaggttcacggggtctttccgtcttgccgcgggtacactgcatcttcacagcgagttcaatttcactgagtctcgggtggagacagcctggccatcattacgccattcgtgcaggtcggaacttacccgacaaggaatttcgctaccttaggaccgttatagttacggccgccgtttaccggggcttcgatcaagagcttcgcttgcgctaaccccatcaattaaccttccggcaccgggcaggcgtcacaccgtatacgtccactttcgtgtttgcacagtgctgtgtttttaataaacagttgcagccagctggtatcttcgactgatttcagctccacgagcaagtcgcttcacctacatatcagcgtgccttctcccgaagttacggcaccattttgcctagttccttcacccgagttctctcaagcgccttggtattctctacctgaccacctgtgtcggtttggggtacgatttgatgttacctgatgcttagaggcttttcctggaagcagggcatttgttgcttcagcaccgtagtgcctcgtcatcacgcctcagccttgattttccggatttgcctggaaaaccagcctacacgcttaaaccgggacaaccgtcgcccggccaacatagccttctccgtccccccttcgcagtaacaccaagtacaggaatattaacctgtttcccatcgactacgcctttcggcctcgccttaggggtcgactcaccctgccccgattaacgttggacaggaacccttggtcttccggcgagcgggcttttcacccgctttatcgttacttatgtcagcattcgcacttctgatacctccagcatgcctcacagcacaccttcgcaggcttacagaacgctcccctacccaacaacgcataagcgtcgctgccgcagcttcggtgcatggtttagccccgttacatcttccgcgcaggccgactcgaccagtgagctattacgctttctttaaatgatggctgcttctaagccaacatcctggctgtctgggccttcccacatcgtttcccacttaaccatgactttgggaccttagctggcggtctgggttgtttccctcttcacgacggacgttagcacccgccgtgtgtctcccgtgataacattctccggtattcgcagtttgcatcgggttggtaagtcgggatgacccccttgccgaaacagtgctctacccccggagatgaattcacgaggcgctacctaaatagctttcggggagaaccagctatctcccggtttgattggcctttcacccccagccacaagtcatccgctaatttttcaacattagtcggttcggtcctccagttagtgttacccaaccttcaacctgcccatggctagatcaccgggtttcgggtctataccctgcaacttaacgcccagttaagactcggtttcccttcggctcccctattcggttaaccttgctacagaatataagtcgctgacccattatacaaaaggtacgcagtcacacgcctaagcgtgctcccactgcttgtacgtacacggtttcaggttctttttcactcccctcgccggggttcttttcgcctttccctcacggtactggttcactatcggtcagtcaggagtatttagccttggaggatggtccccccatattcagacaggataccacgtgtcccgccctactcatcgagctcacagcatgtgcatttttgtgtacggggctgtcaccctgtatcgcgcgcctttccagacgcttccactaacacacacactgattcaggctctgggctgctccccgttcgctcgccgctactgggggaatctcggttgatttcttttcctcggggtacttagatgtttcagttcccccggttcgcctcattaacctatggattcagttaatgatagtgtgtcgaaacacactgggtttccccattcggaaatcgccggttataacggttcatatcaccttaccgacgcttatcgcagattagcacgtccttcatcgcctctgactgccagggcatccaccgtgtacgcttagtcgcttaacctcacaacccgaagatgtttcacttcagagttgcgaaaatttgagagactcacgaacaactttcgttgttcagtgtttcaattttcagcttgatccagatttttaaagagcaaaacttcgcagtgaacctttgcaggtacactctgaagtattttttatttaatcactacagagatggtggagctatgcgggatcgaaccgcagacctcctgcgtgcaaagcaggcgctctcccagctgagctatagccccataacatgtagttaaaacctcttcaaatttgccgtgcaaatttggtaggcctgagtggacttgaaccaccgacctcacccttatcaggggtgcgctctaaccacctgagctacaagcctgtagaggttttactgctcattttcatcagacaatctgtgtgagcactgcaaagtacgcttctttaaggtaaggaggtgatccaaccgcaggttcccctacggttaccttgttacgacttcaccccagtcatgaatcacaaagtggtaagcgccctcccgaaggttaagctacctacttcttttgcaacccactcccatggtgtgacgggcggtgtgtacaaggcccgggaacgtattcaccgtggcattctgatccacgattactagcgattccgacttcatggagtcgagttgcagactccaatccggactacgacgcactttatgaggtccgcttgctctcgcgaggtcgcttctctttgtatgcgccattgtagcacgtgtgtagccctggtcgtaagggccatgatgacttgacgtcatccccaccttcctccagtttatcactggcagtctcctttgagttcccggccggaccgctggcaacaaaggataagggttgcgctcgttgcgggacttaacccaacatttcacaacacgagctgacgacagccatgcagcacctgtctcacggttcccgaaggcacattctcatctctgaaaacttccgtggatgtcaagaccaggtaaggttcttcgcgttgcatcgaattaaaccacatgctccaccgcttgtgcgggcccccgtcaattcatttgagttttaaccttgcggccgtactccccaggcggtcgacttaacgcgttagctccggaagccacgcctcaagggcacaacctccaagtcgacatcgtttacggcgtggactaccagggtatctaatcctgtttgctccccacgctttcgcacctgagcgtcagtcttcgtccagggggccgccttcgccaccggtattcctccagatctctacgcatttcaccgctacacctggaattctacccccctctacgagactcaagcttgccagtatcagatgcagttcccaggttgagcccggggatttcacatctgacttaacaaaccgcctgcgtgcgctttacgcccagtaattccgattaacgcttgcaccctccgtattaccgcggctgctggcacggagttagccggtgcttcttctgcgggtaacgtcaatgagcaaaggtattaactttactcccttcctccccgctgaaagtactttacaacccgaaggccttcttcatacacgcggcatggctgcatcaggcttgcgcccattgtgcaatattccccactgctgcctcccgtaggagtctggaccgtgtctcagttccagtgtggctggtcatcctctcagaccagctagggatcgtcgccttggtgagccgttaccccaccaacaagctaatcccatctgggcacatccgatggcaagaggcccgagggtccccctctttggtcttgcgacgttatgcggtattagctaccgtttccagtagttatccccctccatcaggcagtttcccagacattactcacccgtccgccactcgtcagcgaaacagcaagctgtttcctgttaccgttcgacttgcatgtgttaggcctgccgccagcgttcaatctgagccatgatcaaactcttcaatttaaaagtttgatgctcaaagaattaaacttcgtaatgaattacgtgttcactcttgagacttggtattcatttttcgtcttgcgacgttaagaatccgtatcttcgagtgcccacacagattgtctgataaattgttaaagagcagttgcgacgcggctttcagctcactgtcgcgaggtggcgtatattacgctttcctctttcagagtcaaccctgaatttcaggatttttttctcttcgttgttccgaccatcctgtgaagtgtttcacgttgtcgtctcaacggaggcgcattatagggatcccaattttttgcacaagtatttttttgatctttttttctgtttgttgttttttcaccctttttgctgcaatcgcacacaaaacggtgcttttttgcatactaaaagacttgcacaaggccaataatgcccccaaagtcattagtaaatcatttattgctgaggtaagtatgtctgatgttttacgcccataccgcgatctttttccacaaatcggtcagcgcgtaatgatcgacgatagcagtgtcgtgattggtgacgttcgtctggctgatgatgtggggatctggccgctcgttgtgattcgtggagatgtacattatgtacagatcggagcacgcaccaatatccaggatggcagtatgttgcatgtcactcataaatcctcgtacaacccagatggcaacccattaaccattggcgaagatgtcactgttggtcacaaggtgatgctccacggctgcaccattggcaatcgagttttggttgggatgggctcaattttacttgatggcgcaatagtagaagatgatgtgatgattggtgcgggtagtctggtcccacaaaataaacggctggagagcggatatctgtatctcggtagccccgtcaaacagatccgcccgttaagtgatgaagagaaggctgggttacgctattccgcgaataattacgtgaaatggaaggacgaatatctggatcagggtaaccagacccagccttgatcatcttcactttgttcctgaattaagttttccgcttcttcttccaggtcccagcgatgctgacgaaaactcgctaaccactgttctggcgtatctccagtaaagcgatacgccagactctcgccagagatcgcgcatgtcagttgcataccattcacgagagcgggaaaacatacacattttttattctcgtcccactcttccctgtccggaaactggatggcctgattcacgcggacaattcctcctgcaattgctttataactggttctacgtcaggcagaacaccgtgccagagaagaaaggcatgagccgcctgtgccaccagcattcctaaaccatcagcattacgctttgagcctcgctgctcacaccatgccagaaaaggagtttttcctttctgatagaacatgtcatagcaataaatgcctggatgaatgagcgatgacgggatcgccggaatatcaccactgatgccactggatgttgcattaataatgagatcaaactcatgaccttccagttcgtccatactcaacgcctgaatactgccagtgtgcgcaaacaatttagccaactcttccgcgcgggataccgtccgattagttattgtcaccgcacagtccagggaaaggagtggcagtagtacgccgcgagatgctccaccagcgccgataagcagaatacgtaaaccagggcggataaaagacagacgttccagatcgcttaacaagcctacaccatcggtattgtcacccagcaggcgtccatcttctaaccgcatgagggtattaacagcaccagccaacgctgcccgttcagtaagctcatccgctctggcaaaagcctcttctttaaaaggcaccgtcacattcgcacctttaccaccagcactaaagaaagcgttcagtgtgttgatgaaatcattgatgggtgccaacacgcgcccatagggatgttcaatattcagttgctgagcaaattgctgatgaatgaatggcgatttgctgtgggctatcggattaccaaaaacagcataggtttccattatgttacccctgtcgaaacagttcacccgtcagggcatcgcggatttctgaaggatttaaacgcccccccgtttcaccaggcacaaccgggaacgccgcgccaaattgtgcgcgaacttcgtctactgttcgacaaggtggcaatccactcaagttggcactggtagaaaccagcggtttaccataagcctggcacaaagcaaccaccaacggatggtcggtgactcgtacagcaagcgaatcaaagcggcccgtcaaccagcgcggtgttgtcgcaggcgcgggaaagacaaaggtgacaggacctggccagcgggaaaaaatggtttcacgctgcacgtcagtcaacatggtgtcatcaatatagggtttaagctgctcgtaatttgctgcgattaaaatcagccccttatcaaccggacgctgttttaactccaacagtcgcatcactgctgtttcgctatcaggatcgcacccaacaccgaaaacggcttccgttggataggcgatgacacgttcttcattgagaacatctatcgcagctgcgatagcgtctctttgcaggttattattcacgttattattccgccgaaaccggctttccacattgtttactggcacaaaagtgttttacaccctgcgcggttttcttttcgatgagtagcggataatgacactcagggcattctccagctatgggtttgaagttaatggcaaattgacactccgggtagcgatcacaagagtgaaatgttttgccataacgggagcggcgctggaccagatggcccgtccgacattgggggcatgtaattgctgtttcgtccggtttatcgataagttcggtatgttcgcattcagggtagttaatgcaaccaataaacataccaaagcgtccctggcgtaataccagatttgcgccacatgcagggcaaacctgcccctccagaactttgacgatatgtccatccgctgaagatttcagaggacggacgtagtcacacgccggatactgtgagcatccaagaaacggaccgtgtttcccggatcgaataaccagttcagccccgcactttgggcaggactcattattacgcaccgtgaacagtgctgatttcgccataacaacttatgctgaattaaagaaatgattaatgcagcataccttcattcacttcaaagagtaattcttccatttgctggtacgcattttcgcagcccggaatattgaacaacaccatcaggatcacccatttcagatcatccagttcgaactctgcgttatccagcgcgagcactcgctctatcaccatttcacgagtttcaaggttgagcacctgaatctgctcaaggaaaagcagaaacccacggcagctggcatccagtcgttcacactcttccggtgtataaatacgcatggagagaggatccgaggccagttgcatcggttctgccaacccttcctgataatcagcaagtttttccagccatagcagggcattgtagatatcttctcgctcaaaacctgcgtcggtaagatcctgttcaagtttgtcttgatccacacgcaactcagcttctgtgtgaatataggtttcaaacaaatacattagtacgtcgaacatggcatgccctcctcaatcggacatagccgccgggtacagctgcgatccatcctgctaactccagttcgagtagttgagtaactacctctggcacaggttggccggcacgttcagcgacgacgtcaacaggtgttacctcatctcctacgttagccaggagctcaggaaatggcaatgccacgtcttgctgatctggtgaataaaatgaattttcaggggcgtctggcaaccagtgcaatccaaattgcaagttttccagaatttcttccggttccgtcacaagaatcgcaccttgttttattaaccagtgaggcccttcgcttcccggattccctattggacctggcaaggcaaaaacttctcgcccctgctcaagcgcacaacgtgctgtcaccagcgaaccactacgcaaagccgcttccaccaccagtacacctttacttagaccactgataatgcgatttcttcgtgggaaattgtaagcaaggggtggaacatcgaggggaaattccgagacgagagcgcccccctgttcaagcagactggcagccagtcgggcatgacggcggggatgaatggtattaagtccattccccaatacagcaatgctgacgccatttacctgtaaggctgctttatgcgctacaccatcgattccacgcgccagtccactcgtaattgtcactccacgcgtcgccagagtttcgcaaaataatcgtccccatcgctcgccataccatgaatgcgcccgactccccactacggcaagctgaaatgaatgcagcgcgtgcagttctccttcaacaaacagtgcgccggggtaatctgtcgtcgccagaagttgaggaggataaaattcgctgtccgcaggaattaaatgatggttgggttgctccaaccaacaaagtgagctttcgatactctttcgtggaaatgaaagaaagcgttgtgcctgccgcaatgtaagccctgtttgctgcaatacaaccgcatcaatatgcgactgttttgccacccagtgagcgatacggaccatatcatcgccgtacaagctgctgatactcattaaacgcagccaaatttctgtatcgaccatccttatctccctgccataagcagccttagcaatctttgcgattggtcagtgatgctgtcaatcagagggggatttgtctagaatagaagaaataatctttctaactcctgaacacatctctggagatttatgtcagttttgcaagtgttacatattccggacgagcggcttcgcaaagttgctaaaccggtagaagaagtgaatgcagaaattcagcgtatcgtcgatgatatgttcgagacgatgtacgcagaagaaggtattggcctggcggcaacccaggttgatatccatcaacgtatcattgttattgatgtttcggaaaaccgtgacgaacggctagtgttaatcaatccagagcttttagaaaaaagcggcgaaacaggcattgaagaaggttgcctgtcgatccctgaacaacgtgctttagtgccgcgcgcagagaaagttaaaattcgcgcccttgaccgcgacggtaaaccatttgaactggaagcagacggtctgttagccatctgtattcagcatgagatggatcacctggtcggcaaactgtttatggattatctgtcaccgctgaaacaacaacgtattcgtcagaaagttgaaaaactggatcgtctgaaagcccgggcttaaggataagaactaacgtgtcagaatcactacgtattatttttgcgggtacacctgactttgcagcgcgtcatctcgacgcgctgttgtcttctggtcataacgtcgttggcgtgttcacccagccagaccgaccggcaggacgcggtaaaaaactgatgcccagcccggttaaagttctggctgaggaaaaaggtctgcccgtttttcaacctgtttccctgcgtccacaagaaaaccagcaactggtcgccgaactgcaggctgatgttatggtcgtcgtcgcctatggtttaattctgccgaaagcagtgctggagatgccgcgtcttggctgtatcaacgttcatggttcactgctgccacgctggcgcggtgctgcaccaatccaacgctcactatgggcgggtgatgcagaaactggtgtgaccattatgcaaatggatgtcggtttagacaccggtgatatgctctataagctctcctgcccgattactgcagaagataccagtggtacgctgtacgacaagctggcagagcttggcccacaagggcttatcaccacgttgaaacaactggcagacggcacggcgaaaccagaagttcaggacgaaactcttgtcacttacgccgagaagttgagtaaagaagaagcgcgtattgactggtcactttcggcagcacagcttgaacgctgcattcgcgctttcaatccatggccaatgagctggctggaaattgaaggacagccggttaaagtctggaaagcatcggtcattgatacggcaaccaacgctgcaccaggaacgatccttgaagccaacaaacaaggcattcaggttgcgactggtgatggcatcctgaacctgctctcgttacaacctgcgggtaagaaagcgatgagcgcgcaagacctcctgaactctcgtcgggaatggtttgttccgggcaaccgtctggtctgatagtccactcttctaagcccggtcttgccgggcgtttttatacttatgaaaaaacaacgtaatttacgtagcatggcggcccaggccgttgaacaagtcgtcgagcaagggcaatcattaagcaacattctgccaccgctccagcaaaaagtttccgataaagacaaagcacttcttcaagagttgtgctttggcgtactgcgtacgctttcgcagttagactggctgattaataagttaatggcccgtccgatgaccggcaaacagcggaccgtgcattacctgattatggttggtttgtatcaactgctttatacccgcattccacctcatgctgcgctggctgaaacggttgaaggcgctatcgcaattaagcgtccgcaacttaaagggttgataaacggtgtattacgccagttccagcgtcagcaagaagagttattagccgagtttaatgccagtgatgcacgttatctgcatccttcctggttgctgaagcgtctgcaaaaagcgtatccagagcagtggcaatccatcgtcgaagccaataaccagcgtccgccaatgtggctgcgtattaatcgtacgcatcattcccgcgacagctggcttgcattgctggatgaagcaggaatgaaaggtttcccgcatgcggattaccctgatgctgtacgtctggaaacacctgcacctgttcatgcgctacctggttttgaagacggatgggttaccgttcaggatgcatcagcacaaggttgcatgacctggcttgcgccacaaaacggtgaacacattttggatctttgtgccgcccccggcggtaaaacaacgcatatccttgaggtggcaccagaagcgcaggttgttgcggttgatatcgacgaacagcgcctctctcgggtttacgacaatttaaaacgccttggtatgaaggcgaccgtgaaacaaggtgatggccgttacccttctcaatggtgtggcgagcaacagtttgatcgcattttattagatgcgccttgttcagcaaccggtgtgattcgtcgccatccagatattaaatggttacgtcgcgatcgcgatatcccggaactcgcgcaattgcagtctgaaattctcgacgccatttggccgcatttaaaaaccggtggaactctggtctatgccacctgttcggtgttaccggaagagaatagcctgcagattaaagcctttttgcaacgtaccgctgatgccgaactttgcgaaacaggaacaccagagcaaccgggtaaacaaaatctacctggtgccgaagagggcgacggcttcttttacgctaagctaatcaaaaagtgatgagataacgggtcgcgactgatgaaaattatcattctgggtgccggccaggttggcggcacactggcggaaaacctggttggcgagaacaacgatattactgttgtcgataccaacggtgagcgtctgcggaccttacaggataaatttgacctgcgggtcgtgcaggggcatggctctcatccacgcgtattgcgggaggcaggtgccgacgacgccgatatgctggttgctgtaaccagttcagatgaaaccaatatggttgcctgccaggtagcctactcacttttcaacacccctaatcgcatcgctcgtatccgctcaccagactacgtgcgcgatgccgataagctatttcattcagatgctgtgccgattgatcatctgatcgcaccagagcagttggttatcgataatatttaccgactgattgagtatcccggcgcattgcaggtggtgaacttcgctgagggtaaagtcagcctggctgtggttaaagcctattatggcggcccgctgattggtaatgcactttcgaccatgcgcgaacatatgccacatatcgatactcgtgtggcagcaattttccgccacgatcgccccattcgtccgcaaggttcgaccattgttgaagctggtgatgaagtgttctttattgccgcttcacagcatatccgcgcggtgatgagtgaattacagcgactggaaaaaccgtataagcggatcatgctggttggtggcggtaatatcggtgcagggctggcgcgtcgtctggaaaaagattacagcgttaaactcatcgaacgtaatcagcagcgcgctgccgaactggcggaaaagttacagaatacgatcgtcttttttggtgatgcgtcggatcaagaactactggccgaagaacatatcgatcaagttgatctgtttattgccgtcaccaacgatgacgaggccaatatcatgtccgccatgcttgccaaacgtatgggtgcgaaaaaggtgatggtattgatccagcgtcgcgcttatgtggatctggttcaggggagcgttatcgatattgcgatttcaccacaacaagcaactatttctgcgttgcttagccatgtgcgaaaagcagatattgttggtgtttcctcattgcgccgcggcgtagcagaagctattgaagccgttgctcacggtgatgaaagcacctcacgcgttgtcggcagagtcattgacgaaatcaagctaccgccaggaacgattattggagcggtggtacgtggaaacgacgtgatgattgccaatgacaatctgcgcattgagcaaggcgatcacgtaattatgttcctcacagataaaaagtttattaccgacgtcgaaagactcttccagccaagccctttcttcttgtaattaataaggcgtctaatgacgccttattatttccctttgattatcaaggattaattaaattcattcctggcaggaaaatggcttaacatttgttagacttatggttgtcggcttcatagggagaataacatgagcattattaaagaatttcgcgaatttgcgatgcgcgggaacgtggtggatttggcggtgggtgtcattatcggtgcggcattcgggaagattgtctcttcactggttgccgatatcatcatgcctcctctgggcttattaattggcgggatcgattttaaacagtttgctgtcacgctacgcgatgcgcagggggatatccctgctgttgtgatgcattacggtgtcttcattcaaaacgtctttgattttctgattgtggcctttgccatctttatggcgattaagctaatcaacaaactgaatcggaaaaaagaagaaccagcagccgcacctgcaccaactaaagaagaagtattactgacagaaattcgtgatttgctgaaagagcagaataaccgctcttaacaagcgcctgaaagcagaagaccagtggtaaaaaagtgatttactttcttgccactggcctcccagttcccccgattgccatgttttccttttcgcatgtaactgcctttccccttcttatttttctctacgcgctgtcggaataagggatcatgtagtaatgcttctatcgcattatcctttatctgccctttagtatgctgatatcgactcataaaaactccagttggttatttaacggcgcgagtgtaatcctgccagtgcaaaaaatcaacaaccactcttaacgccactcgccccttgttcaagagcttcaagaatcgaacaataaacactgctatgagcagtcccacaacaggcatcgttaaggcgttgcaaggaacgctgcatactctgcaactcggctatccgtgcttcgacttcctgcaatctttcctgcacaatgccttttgactcctgacaggtatggtgttcaggatcgatgcggatcgacagcaactcgcggatcgactccagactgaaacctagttgtctggcatggcggataaatttcaatcgctggagatcgctttcggtatataggcgaaacccaccttcagtacgcacttcatgctccatcatctgctgtttttcgtaataacgaatcgtgtcgggtgttacttccgccatttttgccagctcaccaatgcgatacatacatactccactagttatcgttgattttgtccaacaacttgtcagcataatcgccgcgtaaaaaatcggtactcaatccagcttgtcgcagcttcaattccagtaatgacaatcgacggctaacctcttgatattgcggatcatcgtgacggatacctttgagaatatccagaagctgaattgcttctctccgttgctcaagttctggcggtaagcaaccggcattcttcagcaagcgataccccgcacgtaattccggtggcacgtgagaatcatcatccagtatcaatggttcgccgctacctgccaggttatcaaactcacctttcgcttgcgcttctgctatatggcgctctgcccactggtcaagtaaccacataaatactccaggggatgaacaaaaagagtacagctattgtagataagtggggatactacgggtataaaaaaacccgccggggcgggtttttttacgttgcttcagattactctgcagcagcttctgctttctctgaacgatcaaccagctcgatgtaagccatcggcgcgttgtcgcctgcacggaagccacacttcagaatacgagtgtaaccaccggcacggctcgcgaaacgcgggcccagttcgttaaacagttttgccacgatctcgttatcacgagtacgggcgaatgccagacgacgattagcaacgctatcagtcttggcaagagtaatcagcggctcaactacgcggcgcagctctttcgctttaggcagagtcgtcttgatgatttcatgacgaaccagtgaacctgccatattgcggaacatagcctggcgatggctgctgttgcggttcagttgacgaccactcttacgatggcgcatgaccttatccttctcagtaaaaccttaacctgtgatccggttactcgtcagcgatgcttgccggtggccagttttccaggcgcatgcccagagacagtccacgggaagccagcacgtctttaatctcagtaagagattttttaccaaggttaggcgttttaaggagctcaacctcggtacgctgtaccagatcaccgatatagtggatagcttctgctttaaggcagttagcagagcggacagtcaattccagatcgtcaacagggcgcagcaggatcggatcgaactctggtttctcttctttcacttcaggctgacgtacatcacgtaagtcaacgaaagcttccagttgttcagccagaatggttgccgcacgacgaatcgcctcttcaggatcgattgtgccgttggtttccatttcgatgaccagcttgtccaggtcggtacgctgttctacacgcgctgcttcaacattgtaggcaatacgctccacagggctgtagcatgcgtcgaccagcagacggccgattgggcgctcatcttcttccgaatgaattcgggtagaagccggcacataaccacgaccgcgctgaactttgatacgcatgctaatagacgcgttctcatcggtcaggtggcagatcacgtgctgcggcttgacgatttcgacatcaccgtcgtgggtgatatcggctgcagtcacagggccaatgccagatttattcaaggtaagaataacttcatctttgccctgaactctcaccgccagccctttcaggttgagcaggatttccaggatatcttcctgaacgccttctttggtgctgtactcatgtagtacaccatcaatctcaacctcggtcaccgcgcaacccggcatcgatgagagcagaatacggcgcagtgcgttacccagagtatggccaaagccacgctctaaaggctcaagggtcaccttggcgtgcgtcgaactcacttgctcgatatcaaccaggcgcggttttagaaactctgtcacagaaccctgcattgtgtcctctctttggtactaagctttacttggagtaaagctcgacgatcaggtgttcgttaatgtccgcagacagatcagaacgctccggcttacgcttaaacgtaccttccatcttgccagcatcaacttccagccaggttggcttttcacgctgctcagccagctccagagcggctttcacgcgagactgcttcttcgctttctcacgaatgcttacaacgtcattcggactaacctgataagaagcgatgttaacaacacgaccgtttaccataattgctttatggctaaccagctgacgtgcttctgcacgagtggcaccgaagcccatacggtatacaacgttgtccagacgaccttccagcagagccaacaggttttcaccggtgttgcctttcagacgtgctgcttctttgtagtagttacggaactgacgctccagcacaccatagatacggcgaactttttgcttttcacgcaactgcacaccatagtcagacagacgcggtttacgcgcaccgtgctggccaggagcttgttcaattttacacttggtatcgatcgcgcgaacgccagacttaaggaataagtcggtgccctcacgacggctcagcttgagcttaggacccaaatatcttgccattttctttctccaacaaacctggaaaacgaggcgttatacgcgacgttttttcggcggacgacaaccgttatgagggatcggagtcacatcagtaatgttagtgatgcggaaacctgcggcgttcagagcacgaatagtagattcgcggcctggacccggacctttaaccataacttccagattcttgatgccgtattctttcacggcgtcagcgcaacgctctgctgcaacctgagctgcaaacggagtggatttgcgagaaccacggaaaccggaaccaccggctgttgcccaacccaacgcgttaccctgacgatcagtgatagtcacgatggtgttgttgaaagaagcatggatatgagccacgccgtcagagacttgttttcttacacgtttacgtgcacgaattggtgcctttgccattattcaatcaccccgattatttcttgatcggtttgcgcggacccttacgggtacgtgcgttggtcttggtacgctgaccgcgaaccgggagaccacgacgatgacgcaaaccgcgatagcaaccaagatccatcaggcgcttgatgctcatgctgatttcacggcgcagatcaccttcaacgacaaatttggcaacttcgtcacgcagcgtgtcgatttgtccttcagacagctcactgatcttaacatcttcagcgatacccgctgcagccaggatggctttagaacgggtcttgccgacgccataaatcgaagttaatgcgattacggcatgcttatgatcaggaatgttaatgcctgctatacgggccactatgcactcctactatttaatatgtacgttccatgctgaaaagcccgttttcaggatactcaaatggaaacgcacagacatacaaaagattggctggctaatctagccagctcaacccaactttgcaagaaaaatatgcgaaaaaatcagccttggcgctgtttatgcttcggctcggcactgcaaatcacacggatgacaccatcacgcttaacgattttgcagttacggcataatttcttgacggaagcacgaactttcatttttactctccgtaacttctcgggcgaccaattatcggccgtagcctttcaggttcgccttcttcaatgcagactcatactgactggacatcatcagagtttgcacttgagccataaagtccataatcacgacaacaacgataagcagtgaggtcccaccgaagtagaacggtactttcattgcatcacgcatgaactccgggatcaggcagataaaggtaatatacagcgcaccaaccagggtcaggcgggtcattactttatcgatatacttcgccgtttgctctcccggacgaattcctggtacaaatgcaccggacttcttcaggttatctgctgtttcacgcgggttgaaaaccaacgccgtgtagaagaaacagaagaagatgattgcagacgcatagagtaacacataaagcggttgcccaggctgcaaatacagcgaaattgttgtcagccagttccaaccagtaccgcccccgaaccatgacgcgatggtcgccgggaacagaataatactggaagcgaagattgccgggattacccccgccatattcactttcagcggtaaatgtgtgctctgtgcagcatagacacgacgaccttgctgacgtttcgcgtagtttaccacaatgcggcgttgaccacgctcaacaaatacaacaaagaacgtcactgcaaatactaatactgcaaccaacagcaacacgaggaagtgcaggtcgccttgacgcgcttgctcgatagtatgggcaatggctggcgggagtcccgcgacaataccggcgaagataatgattgaaataccgttgccgatacctcgttcagtaatctgttcgcccaaccacatcaggaacatggttcctgtgaccagacttacaacagcggtgaagtagaatgcaaagcccgggttaatcaccaggccttgcataccaggcatattcggcagaccggtagcaataccgatcgactggaatattgccagcaccagagtaccgtagcgggtgtactggctgatcttacgacgaccagactccccttctttcttaatttctgccaacgttgggtgaaccaccgtcagcagctggataatgatcgacgccgaaatatacggcatgatccccagagcaaagatagaagcacggctgagagcaccaccagagaacatgttaaacatctcaatgatggtgcctcgctgttgctcaagcagtttggcaagtacagcggcatcaataccagggatcggaataaaagagccaatacggaacacaatcagcgcaccgataacaaacagcagtctgcgtttcagctcgcctaagccacctttggcactttgaaaatctaatcccggttgtttagccatctgctacttattcctcgattttaccgccagcagcttcgatagcagcacgagcgcctttagtaacacgcaggccacgaacagttaccggagtcgttacttcgccagccaggatcactttcgcgaactcgatctggataccgataatgttagccgctttcagcgtgttcaggtctactacaccgccttctactttagccaggtcagacagacgaatttcggctgtaatcgctgctttacgagaagtgaagccgaatttcggcagacgacggtacagaggcatctgaccaccctcgaaaccgcgacgtacgccaccgccagaacgagacttctgacctttgtgaccacgaccaccggttttaccgaggccagaaccgataccacgacccaggcgtttacccgcctttttggagccttcggccggagacagagtatttaaacgcatctcttactcctcaactttaaccatgaaggaaaccgcgttgatcataccgcgaatagcaggagtatcctcgcgctctacggtgtgaccaatacgacgcagacccaggccaagcagcgttgccttgtgtttcggcagacgaccgattgcactgcgggtttgagtaattttaatagtctttgccatggtttatttccccagaatttcttcaacggatttaccacgcttggcagcgaccatttctggagaattcatattttccaggccatcaatagttgcacgaaccacgttgatcgggttggtggaaccataggctttagccagaacgttatgaaccccagcgacttccagaacggcgcgcattgcaccaccggcgatgataccggtaccttcggaagccggctgcatgaatacgcgagaacccgtgtgaacacctttaacagggtgttgcagagtgccgttattcagcgcgacgttaatcatattgcgacgggctttttccatcgctttctggatcgctgctggaacttcacgcgctttaccgtaaccaaaaccaacgcgaccgttaccatcgccaactacagtcagagctgtgaaggagaaaatacgaccacctttaacggttttagatacgcggtttaccgcgatcagcttttcctgcagttcgccagcttgtttttcgatgtgagccatcttacacctctaccttagaactgaaggccagcttcacgggcagcatctgccagtgcctggacacgaccatgatattggaacccggaacggtcaaaggatacatctttgatgcctttttccagagcgcgttcagcgacagctttacccacagctgcagccgcgtctttgttaccggtgtacttcagttgttcagcgatagctttttctacagtagaagcagctaccagaacttcagaaccgttcggtgcaattacctgtgcgtaaatgtgacgcggggtacgatgtaccaccaggcgagttgcgcccagctcctggagcttgcggcgtgcgcgggtcgcacgacggatacgagcagatttcttatccatagtgttaccttacttcttcttagcctctttggtacgcacgacttcgtcggcgtaacgaacacccttgcctttataaggctcaggacgacggtaggcgcgcagatccgctgcaacctggccgatcacctgcttatcagcgcctttcagcacgatttcagtctgagtcggacattcagcagtgatacccgcaggcagctgatggtcaacaggatgagagaaacccagagacaggttaatcacattgcctttaaccgctgcacggtaacctacaccaaccagctgcagcttcttagtgaagccttcggtaacaccgataaccattgagttcagcagggcacgcgcggtaccagcctgtgcccaaccgtctgcgtaaccatcacgcggaccgaaggtcagggtattatctgcatgtttaacttcaacagcatcgttgagagtacgagtcagctcgccgtttttacctttgatcgtaataacctgaccgttgatttttacgtcaacgccggcaggaacaacgaccggtgctttagcaacacgagacattttttcctccgattaggctacgtagcagataatttcgccaccaagaccagcctggcgcgctgcacgatcagtcataacacctttagaggtagaaacaactgcgatacccagacccgccataactttcggcagctcatctttacgtttatagatgcgcagacctgggcggctgacacgctgaatgctttctacaacagctttgccctggaaatacttcagagtaagttccagttcaggcttggtgtcgccttcaactttaaaatcttcaataaaaccttcttccttcagcacgttggcgattgccactttcagcttggaggaaggcatggtgaccgcagctttgttcgcggcctgaccgttacggatacgggtcagcatatccgcgatcggatcttgcatgctcatctgtctttactcccgtgattcaattggtgacaattaccagctagcctttttcagacccgggatttcaccgcgcatagcggcttcacggaccttaatacggctcaacccgaacttccgcaggaaaccatgcggacgacctgtttgacggcagcggttacgctgacgagacgggctggaatcacgcggcagagtctgcagcttgagaacagcgttccaacgatcttcgtcggaagcgttcacatcagagatgatcgctttcagttcagcgcgtttcgcgaagtatttatcagctaaagctacgcgttttacttcgcgtgctttcattgattgcttagccatttagtaaccctaccttacttgcggaacgggaagtcaaaggcagccagcagagcgcggccttcttcgtcagatttcgcagtagtggtaatggtaatatccaaaccacgaacgcggtcgactttatcgtagtcgatttctgggaagatgatctgctcacggacacccatgctgtagttaccacgaccgtcgaaagacttagcggacaggccacggaagtcacggatacgaggtacagcaatagtgatcaggcgctcaaagaactcccacatgcgttcgccacgcagagttactttacagccgatcggatagccctgacggattttgaagcctgcaacagatttgcgtgctttggtgatcagcggtttttgaccggagattgctgccaggtctgctgctgcgttatccagcagttttttgtcagcgatcgcttcaccaacacccatgttcagggtgatcttctcgacccgagggacttgcatgacagaattgtagttaaactcagtcatgagttttttaactacttcgtctttgtagtaatcatgcagtttcgccatcgtactactccaaattacttgatagtttcgctgttagacttgaagaaacggacttttttaccgtcttcgaatctaaagcctacacggtcagccttgccggttgccgcattgaagattgctacgttggaaacctgaatagcggcttctttttcaacgatgccacccggttggttcagggccggaaccggcttctgatgtttcttaaccaggttgataccttcaacaatgaccttgccggaagacaggacattcttaactttaccgcgtttacctttatctttaccggttaacacgataacttcgtcatcacgacggattttcgctgccatgattcgctccttagagtacttctggtgccagagagataattttcatgaacttctcactacgaagctcacgagttaccggcccaaaaatacgcgtaccgataggctgctcgctgttgttgttcagaagaacacaagcattaccatcgaagcgaatgacagaaccgtccgggcgacgaacacccttcttggtgcgcaccactaccgccttcagcacatcaccttttttgaccttaccacgcggaattgcttctttgatggtgatcttgatgatgtcgcctacgcctgcgtagcgacggtgcgagccacccagaaccttgatacacattacgcgacgtgcaccggagttgtcggcgacgttcagcatagtctgttcttggatcattttagtgctccgctaatgtcaactactactgagacccgaaaatcaggtcgttaaaaatccccatatcgagggcgcggcattataacaccgcttcaaggatatgggtagaaaaaataaacggctcatttctgagccgtttattcgtattgagagagtgtactgtattacagaaccgctttctctacaacgcgaaccagcgtccaggatttagtcttggacagcggacggcattcgcggatttcaaccacgtcaccgataccgcattcgttgttctcgtcatgtacgtgcagtttggtcgtacgcttgatgaatttaccgtagatcgggtgtttcacaaaacgttcgatagcaacaacaatggatttctccattttgtcgctaacaacgcgaccttgcagagtacggattttatcggtcattacgcacccgccttctcgttcagtaaagtcttaacgcgtgcgacatcgcgacgcacttgcttcaacaggtgagactgttgcagctggccacttgcagcctgcatacgcaggttgaactgctcacgcagcaggttcagcagctcggtgttcagctcttcaacgctcttctcacgcagctcttttgctttcattacatcaccgtcttagttacaaaggtggttttaatcggcagtttcgctgctgccagcttgaatgcttcacgggccagctcttccggaacaccgtccatttcatacaggactttacccggctgaatcaaggcaacccaatactccacgttacctttacctttacccatacgcactgccagcggcttttcagtgatcggtttgtccgggaacacacggatccagatcttaccttgacgcttaactgcacgggtcatagcacgacgtgctgcttcgatctgacgggcagtcagacgaccacggccaacagctttcagaccgaagctgccgaagctaacatccgtaccctgcgccagaccgcggttacggcctttgtgcattttacggaattttgtacgctttggttgtaacatcagcgacgctccttatttacggcctttacgctgctgctttttaggctgagcagccggtttttccggttgttcaacagcagccataccacccaggatctcgcctttgaagatccacactttaacgccgattacaccgtaagtggtgtgcgcttcagaggtgttgtagtcgatgtcagcacgcagagtgtgcagcggtacgcgaccttcgcggtaccattcggtacgtgcgatttccgcgccgcccagacggccgctaacttcaactttaatacctttagcgcccagacgcattgcgttctgtacagcacgcttcatagcacgacggaacataacgcgacgttccagctgagaagtgatgctgtcagcaaccagttttgcgtccagttcaggcttacgaacttcggcgatgttgatctgtgcaggaacgccagcgatgtccgctacgaccttacgcagtttttctacgtcttcaccttttttaccgataacgatacccgggcgagcagtgtgaatggttacacggatgctcttagccggacgctcgataacgatacgagatacggacgctttagccagttccttagtcaggtactgacgtactttaaaatcgctgtccaggttgtcagcgaattctttggtgttcgcaaaccaggtagagttccatggttttacaatacccaggcgaataccattaggatgtactttctgacccattgctagtctccagagtctcagcgatcggacacaaccacagtgatgtggctggtgcgcttcaggatgcgatctgcacgaccttttgcacgcggcataatgcgcttcatgctcgggccttcgtctacgaaaattttcgtaactttcagatcgtcaatgtcagcgccatcgttgtgttcagcgttagcaatggcagattccagaactttcttgaccagtacagccgctttcttgttggtgtaggtcaaaatatccagagcctgcgacactttcttaccgcgaatcaggtcagcaacaaggcgaaccttctgagcagaagaacgagcatggcgatgtttagcgatagtttccatctcttcctcctaccttatttcttcttcgcttttttatcagcagcgtggccgcgataagtacgagtcggtgcgaattcacccagtttgtgaccaaccatttcgtcggttacaaataccggaacgtgctgacgaccattatggacagcgatggtcaaaccgatcatgttaggaaagatcgttgaacgacgggaccaagtgcgcaggggcttcttgtctccgctttccaccgctttctctaccttcttcagcaagtgcaggtcaataaaaggacctttcttgagagaacgtggcatggcttatcctctaaaattatttgctacggcgacgtacgatgaatttatcagtacgcttgttgctgcgggtcttcttacctttggtctgaacgccccacggagttaccgggtgcttaccaaagttacgaccttcaccaccaccatgtgggtggtctaccgggttcatcgcggtaccgcgaacggtcggacgaacaccacgccagcgtgcagcacctgctttacccagaacgcgcagcatatgctcagcattgccaacttcgcccagagttgcacggcagtctgcttctactttacgcatttcaccagaacgcagacgcagggtgacataagcaccatcacgagcaacgatctgaacgtaagtaccagcggaacgtgccagctgaccgcctttacctggtttcatttctacgttatgaacagtagaaccaaccgggatgttgcgcatcggcagggtgttacctggtttgattgcagcatcaacgccagactgaatctggtcgccagctttcaggcctttaggggccaggatgtaacggcgttcaccgtctttgtacagaaccagcgcgatgttcgcggaacggttcggatcgtactcaagacgttcaacaactgccgggataccgtctttgttgcgtttgaagtcaacaatacggtaagcctgcttgtggccaccaccgatatgacgagtggtgatacggccattgttgttacgaccaccggatttgctgtttttttccagcaacggagcaaaaggtttgcccttgtgcagctcagggttaaccactttaactacgtggcgacgacccggagatgtcggtttacatttaacaactgccattgtattactcctccgacttactcagcgccgccaacgaagtccagattctggccttctttcagggtgacgtaagcttttttccagtcgctacgacgaccgatacgctgtccgtgacgtttaactttccctttaactaccagggtgttaacgacttcgacttcgacttcaaacagtttctgcacagcagctttgatttctgctttggtcgcgtctttagcaactttgagtacgatggtgttggatttttccatcgcagtagacgctttttcagaaacgtgcggtgcacgcagcaccttcagcagacgttcttcacgaatcatgccagcatctcctcaacttgcttaacagcatcagcagtcattacgactttgtcgaaggcgatcaggctaaccgggtcgataccagttgcatcgcgtacgtcaaccttgtgcaggttgcgcgcagccaggaacaggttttcgtccagctcaccggtgatgatcagcacatcttccagagccatgtctttcagtttctgtgccagcagcttagttttcggcgcttctacagagaacttctcgacaacgatcagacgatcctgacgtaccagttcggacaggatgcttttcagcgcgccgcggtacatcttcttgttaactttttgactgtggtcctgcggacgagcagcaaaggtcacgccaccagaacgccagatcgggctcttgatagaaccagaacgcgcacggccggtgcctttctggcgccacggttttttaccggaaccagttacttcagcacgagtcttctgagcacgagtaccctgacgagcaccagctgcataagcaacaacaacctggtgaaccagcgcttcgttgaaatcacgaccgaaggtagtttcggaaacagtcagcgcgctctgcgcgtctttcaatactaattccattgctatctccttacgccttcacagctggtttaacgatcaggtcgctaccggttgcacccgggacagcacctttaaccagcagcaggttgcgctcagcgtcaacgcgtactacgtcaaggctctgaacggttacacgttcgttacccatctgacctgccattttcttgcctttgaacactttgcccggagtctggttctgaccgatagaacccggaacgcggtgagacaaggagttaccgtgagtagcgtcctgggtacggaagttccagcgcttaacggtacctgcgaaacctttacctttagaggtgccagttacgtcaacttttttaacgtcagcaaacagttcaacgctaatgctctgacctacagtgaactcttcgccttcagccaggcggaattcccacagaccacggccagcttctacgccagctttagcgaagtggccagcttcaggcttggtcacacggttagcttttttagcaccggtggtcacctgaatagcacggtagccatcgttagccaggtctttaacctgagtaacgcggtttgcttcaacttcgattacggttactgggatagaaacgccgtcttctgtgaagatacgggtcatacccacttttttaccgactaaaccaatcattgtttcaacctctcaatcgctcaatgacctgattaacccaggctgatctgcacgtctacaccggcagccagatccagacgcatcagagcatcaacggttttctcggttggctcaacgatgtcaaccagacgcaagtgagtacggatttcgtactgatcgcgcgcgtctttgttgacgtgcggggagatcagaacagtgaagcgctctttgcgtgtcggcagcgggatcggaccacggacctgcgcaccagtgcgcttggcagtctcgacgatttccgcggttgcttgatcgatcagacgatgatcaaacgctttcaggcggatacggattctttggttctgcatgagaccagagctccaattattttataaacgaaaatgattactcctcagacccattacgattgatgggagagtgtaaccgttcttacgtagctccccgattgggagcattgttaggtagccaaattcggctaactgaggttcagattgaacctgctgtcaactacgacaagcccgcgcattatacatacttaaccaccgaacgcaagcgtattgctagtaaagtaaacagccttcgggttatctctcaagttcgttcagtgcatttttgacacgctctcttaaaccggctttctcttcgctttcttccacagtattttcttcgtcttcagaagaagagggggcattctcaaccgcgacgcctgggtcatcttcctcctcgacggattcgacgacggggagtggctgttttttgaagaaatagtgttgtgttgattgtttaaaagcgggcgtttcagcctctacagtgacttcggcttttactatccaaagcacccatagctgcctggcatacccaccaaccagcaccattcctgcaaaccacaggcaaatcagtaataaacaaattacatatattatggtgctgtgtttttgtcgggagaagataccagggtgacctgtttctttctgctcacgcgcggcgatatagaattcaaacatgtcatttccccttcactgttgtttccggggaaatatttgcttcatcccgatataagtaggcactctcccctgccacctgccagagatgtactaacgttgaaaagccaacaacaccgtcagttttcaagtggtggcttttttgaaattgctttattttttctaccaacaagggacgccactccgccgaaggttctgtcgaaatatgcaatgcgcggtttaacatcgtttccagccagagaatctcttcctcgctgctatcacgcgtaatggtactctccccttccggcgacattttccacaacagaagataatcacccgtccataccgactcaaaccatttatgtgtcagcgtccacgtttgctgacctacgaggacatcaacgctagcctcaccgacgcgaacgaccacaacaggcaattttttgtccccgactttaagcgatgcgatccagggcaaattctgatctaccaatgtttgtaaagaagcattcccacttttacatgccagccccgctcttactgcctgatcgcaccaggccgaatcagctgggacctcgtacccccatacgccgtataacacgcttagcgcctcactatcgcgcatcaccacatgagcaatatccttagtcatatcttgtttaactactggcgttacgggtatcagccacgcaggaacgggtaacgtagctgtaaaagaggacagcagtagccaaccacaggtaagagcgataatggttccactcatcaccacggcaagctgcattttccgggggcggttatcacccaatatgcggtaaatcattcgccattgttttgctgtgaaaacgctggtctgctcggcttgctgtaataagcgaattgtttcgccggcaagcgccagctttctgcgatcgccccgacataataaagctatccgtttcagaactctggcggttaaaaggagatcgggttggtcaatattctgaccttcaaggatgcttgccttaagttcgtgctccgtcagacgtcctatcgagacaagttcaatgccctgttttttaaaatcacgttcgacttttcgatcgggtctgccgatcagcaaaaattgaccgtcaggaataagagatattgcgcgttggagatcatcaagtatgcggcggtgattcaggtgagcattttcaataataataagagggcagcgactatcagttcgatgaagcgcatgcagtaattgccccgccatctcatctcgcgtccaggcgctgtcacggcagccctgttcagccgcgttatcgtcggtaacgatccatgcggccttaccttgccaggaaacaacgaggcttaaagtaatcacacggcgatgtttatctttttgcagttgctgcgccagccaggtttttccacttccagcctcacccaacaaatagcatagacgccaggtttgacgtttctcacacaaccaggaaagaataacttctcttctcgtagacatagaacttcctgttttaattattgattatccttaatcataaaaataatgtatgtatttattaattaaatacatattactaatataaataaattttgcttgattcatgcaagcggcattaatactatttatactaacgtcaatatacaacccacccaatctattttattagaacatacatcgtgcccacactacgtttccccttccatctggcgaatcataataaagatgctgccatcaatatattgattatatttataagcatagggtcgattatttttaatgtgaattatttccatacaactatagttaaaaatggacagatcattaatcaaccaacaaacgcatttcagtctgatttcagccttgccgctttatggcgtaacgaaaatcatgctggggtaaaagatgcaaatcccgtggcagttaatcaggaaacacctaagctctctatagcgcttaatggcattgtactcacatcgaatgatgagacttcttttgtcttaattaatgaggggagcgaacaaaagcgatactccctcaacgaagcccttgagtcagcgccgggaacgtttattagaaaaataaataaaaccagcgttgtgtttgaaactcacgggcattacgaaaaagtaactctccatccagggctacctgacatcatcaagcagcctgattcagaaagtcaaaatgtactcgctgattatattatcgccacgcctatacgtgatggagaacagatatacgggcttcgattgaaccctcgtaagggcctcaatgcatttaccaccagcttgctacaaccaggggatatcgccctcaggatcaataatctttcgctgacccaccctgatgaggtttcacaggcattaagtttactgctaactcaacaaagtgctcagtttacaattcgtcgcaacggcgtaccccgcttgataaatgtttccgtcggggaacttacaggaatgaatggactgcgtcatgaaaggactcaataaaatcacctgctgcttgctggcagcactactcatgccttgtgcaggacacgctgagaacgaacaatacggcgcgaacttcaataacgccgatatccgccagttcgtggaaatagtgggtcagcatcttggcaaaacgatcctgatcgacccttcggtacagggaaccatttccgtacgcagtaatgatacgtttagccaacaggagtactaccagttctttttaagtattcttgatctttacggttattccgtgatcacgctggacaatggttttctgaaagtggttcgctcagctaatgtaaaaacatcgccagggatgattgctgacagttctcgtccaggcgtaggtgatgagttggtcacccgaattgtaccgcttgagaacgttcctgctcgtgacctggcccccctgctccgccagatgatggatgcgggtagcgtcggtaatgttgtgcattatgaaccctccaacgttcttattctgaccggtcgtgcctccaccattaataaactgattgaagtcataaagcgcgttgatgtcatcggcacagagaagcagcaaattattcatctggaatatgcgtcagcggaagatctcgccgagattcttaatcaattaatcagcgaaagccacggtaaaagccagatgccagccctcctctccgcgaagattgtggcggataagcgaaccaactctcttatcatcagtggaccggaaaaagcacgccagcgcatcacttcattactgaaaagccttgatgtcgaagagagcgaggaaggaaatacccgggtttattacctgaaatatgctaaagccacgaatctggtggaagtgctaaccggtgtttccgaaaagctgaaagatgaaaaagggaatgcgcgtaagccctcctcttctggcgcgatggataacgtcgccattaccgccgatgaacagactaactctctggtcattaccgctgaccagtccgtccaggaaaaactcgccacggtaattgcgcgtctggacattcgccgtgcacaggtgctggttgaggcaatcatcgttgaagttcaggatggaaatggactaaacctcggcgtgcaatgggcgaataaaaacgttggcgcacagcaatttaccaataccggattaccgatttttaacgctgcgcaaggtgtggctgattataaaaagaatggtgggatcaccagcgcgaatcctgcctgggatatgtttagcgcctacaatggcatggccgcaggcttcttcaatggcgactggggagtactgcttaccgcgctggccagtaacaataaaaatgacatcctcgccaccccaagcatcgtaacgctggataataaactcgcgtccttcaacgtggggcaggatgtgccggtgctatccgggtcacagaccacttcaggggataacgtctttaataccgtcgaacgcaaaacggtggggacaaaactcaaagttactccgcaggtcaatgaaggcgacgcggtgttgctcgaaatagagcaggaagtctccagcgttgactcttcctctaactcgacgctcggcccgacgtttaatacccgtactattcaaaacgccgtgctggtcaaaaccggtgaaacggtggtcctgggcggattgctggatgatttttctaaagagcaagtgtcaaaggttcctctgcttggcgatattcctttagtggggcaactcttccgctatacctccaccgagcgcgctaaacgcaacctgatggtatttatccgtccgacgattatccgtgacgatgatgtttatcgctcactgtcaaaagagaaatacacccgttaccgtcaggagcaacaacagcggatcgacgggaaatcaaaagcgctggttggctcggaagatttgccggtgctggatgaaaacacgttcaacagtcacgcccctgcgccatcgtcacggtgaggcattcatatgagaattcactcaccgtaccccgccagttgggcgctggcacaacgaattggttatctctattcagagggcgagattatttatctcgccgatacgccattcgagcggttactcgatattcaacgtcaggttggccagtgccagaccatgaccagcttgtcacaggctgattttgaagctcggctggaagcggtattccatcagaataccggtgagtcgcaacagattgcgcaggatatcgatcaatccgtcgatcttctctcgctttcggaagagatgcccgcaaatgaagatctcctgaatgaagattcagcggcaccggttatccgcttgatcaatgcgattttgagtgaggccatcaaagaaaccgcctctgatatccacattgaaacctatgaaaaaacaatgtcgatccgttttcgcatcgacggcgttttgcggacaattttacagccaaacaaaaaactggcggcactgcttatctcccgaattaaggtcatggctcgtcttgatatcgccgaaaaacgtattccacaggatggaagaattagtttgcgtatcgggcgacgtaacatagatgtccgcgtatccacactgccgtccatctatggtgaacgcgccgtactccgcctgctggataaaaacagcctccagctttcattgaacaacctggggatgacggcagcggataagcaggatttagaaaatctcattcagcttccgcacggtattatcctggtgacagggccgacaggctccggtaaaagcaccacgctctacgccatcctttcggcgctgaatactcccggccgcaatattctgacggtagaagatcccgtggaatatgagctggaaggcattgggcaaacgcaggtgaatacccgtgtggatatgtctttcgctcgcggcctgcgcgccatacttcgccaggacccggatgtcgtcatggtgggggaaattcgtgatacagaaaccgcgcagattgcggttcaggcctcgctcaccggccatctggtactctcaacactccacactaacagtgcatcaggcgcagtgacccggctccgcgacatgggcgtcgaatcattcctgctttcgtcttccctggcagggattatcgcgcaacgtctggttcgtcgcctgtgtccgcaatgccgacaattcacgcccgtatcaccccaacaagcgcagatgtttaaatatcatcagctcgcggtgacaacaattggcactcccgtaggctgccctcattgccatcaatccggctatcaggggcgcatggcgatccacgaaatgatggtggtgacgccggaattacgggccgctattcatgaaaatgtggatgaacaagcactggagcgactagtccggcaacaacacaaggccttaatcaaaaatggcctgcaaaaagtgataagcggtgacacctcctgggatgaggttatgcgcgtcgccagtgccacgctggagagcgaagcatgaattatcgctatcgcgccatgacccaggatggtcaaaaattgcaagggatcattgatgctaacgatgaacgtcaggcacgactgcggctgcgtgaagaagggcttttcctgctggatattcgcccccaaaaaagttcgggagtaaaaacacgtcgcccgaggatcagccatagtgaactgacgcttttcacccggcagttggcaaccttaagcgcagcggcattacccctggaagagagccttgccgtaatcggtcaacaaagcagtaataaacgactgggtgacgtgttaaatcaggtacgcagcgccatccttgaagggcatcccctttccgatgcattacagcattttcccacgcttttcgattcgctctatcgtaccctggtaaaagcgggcgaaaagagcgggctgctggccccggtgttggaaaagctggctgattacaatgaaaaccggcagaaaatccgcagcaagctcattcagtcactgatctacccctgtatgctcactacggtggcgattggggtcgtgattattctcctcactgctgtcgtgcccaaaattaccgaacagttcgtgcatatgaagcagcaactgccgctgagtacacgcattcttttaggtctgagcgacacgttgcaacgtaccggcccgacattattagcgacagtgtttattgtcgctgtaggtttctggctctggttaaaacgcggcaataaccgccaccgttttcatgccatgttgctgcgcgttgcgctcatcggcccgctgatttgcgccattaacagcgcacgctatctccgcactttaagtattttgcaatccagcggcgtccctctgctggatgggatgaatttgtccaccgaaagcctcaacaacctcgaaattcgccagcgtctggcaaatgcggcagagaacgttcgccagggtaacagcattcatctttcgctggaacaaaccgcaattttcccgccgatgatgctctacatggtggcctctggcgaaaaaagcgggcagctcggcacattaatggtcagagccgcagataaccaggagacactccaacaaaatcggatcgccttaacgctctccatcttcgagccagcactcattattacgatggcactgatcgtcctgtttattgtcgtgtcggtactccaacctcttcttcaacttaactcaatgattaattaaggaaagcatatgcgcgcaacggataagcaacgcggttttacattactggaaattatggtggtgatcgtcattatcggcgtacttgccagcctggtggttcctaacctaatgggcaataaagaaaaggcggataagcaaaaagccgtcagcgatattgtggcgctggaaaacgcccttgatatgtacaaactcgacaatcatcactatccaaccacaaatcaggggcttgaatccttagtagaagcgccgacactgccaccgctggccgcaaactataacaaggaaggttatatcaagcgtctgcctgccgatccctggggcaatgattatgtcctcgttaatcctggtgaacatggtgcatacgatctgctttcagcagggcccgatggtgaaatgggaaccgaggacgacatcaccaactggggtttgagcaagaagaaaaagtaagtcagcgatgaatcagcaacgcgggtttaccctgctggagatgatgctggtgctggcgctggtcgctatcacggcaagcgtggtgctcttcacatatggccgggaggatgtcgccagcactcgtgcgcgcgaaacagcggcgcggtttaccgctgcacttgaattagccatcgaccgcgccacgctcagtggtcagcctgtcggtatccatttctctgattcagcatggcgcattatggtaccgggcaaaacaccatcagcctggcgctgggttccattacaagaagatgccgcagacgagagccaaaatgactgggatgaagaactctcaattcatcttcagccatttaaacctgatgacagcaaccagccacaggttgtgattctggccgacggacaaatcacgcccttctctttgttgatggctaacgccgggaccggtgagccgctcctgacgttagtctgttcaggctcatggcccctggatcaaacgctcgccagagatacccgcccatgaacaaacaatcagggatgacactgcttgaagtcttactggcgatgagtattttcaccgctgttgctctgactttaatgagcagtatgcaagggcaacgaaatgccatcgagcgaatgcgtaacgagacgctggcattgtggatagcggataaccagcttcagtcacaagattcattcggcgaggaaaacacgtccagttctggcaaagagttaataaatggcgaagagtggaactggcgcagcgatatccactcaagcaaagacggcacgcttctggaacgcaccataacggtgacattacccagcggtcagacaacctcgcttacgcgttatcaaagcatcgataataaatccgggcaggcacaagatgattaatcgccagcagggtttcacattgctggaggtcatggcggcgctggcgattttctcaatgcttagcgtgctggcgtttatgattttttcgcaagcttccgagttgcatcaacgctcacagaaagaaatccagcagttcaatcagctacagcgcaccatcaccattcttgataacgatctcctgcaactggtcgcccggaggaatcggagtacggacaaaatcatggtgttgggtgaagaagctatttttaccacgcaaagtcgcgatccgctggctcctctcagtgaagcacaaaccttactcactgttcactggtatctgcgaaatcatacgctctaccgtgctgttcgtacttctgtggatggcaggaaggatcaacccgcccaggcgatgctggaacatgtcgagagctttcttctggaaagtaacagcggggaaagccaggaacttcctctctcagtcacgttacatctgcagactcagcaatatggggggttacagcgccgttttgcattacctgagcagttagcgagagaagagtcgccagctcagacgcaggccgggaataataaccatgaataatgaacaacgcggcgtcgcgctgctcattgtactcatgttactggcgctcatggctgctctggcagcagacatgacgctcagttttcacagccagcttcagcgaacccgccaggtaaaccatcatctgcaacggcaatatgatattgaactggcggagaaacttgcgcttgccagcctcacccaggacgttaaagataacgacagacagaccacgttgcagcagtactgggcacagccacaacagttgcagctggaagatggcaatacagtgaagtggcagttacgcgatgcccagcactgttttaatctcaatgcgttagcaaaaatctctgacgacccgctggcttcccctgatttccccgcccaggtattcagtgcgctgctgattaacgccggtatcgatcgcggaaacaccgatgagatcgtgcaatcaatcgctgactatattgatgtcgatgactcaccacgctttcacggcgcagaagatagcttttaccaaagccagacgccgccccggcatagtgccaatcagatgctttttctgactggcgaattacgtcagataaaaggcataaccgaaaacatctatcagcggcttatcccgtatgtctgcgttctcccgaccacggaacttagcatcaatcttaatatgctaacggagaacgatattccgctcttcagagcgttattcctcaataacatcacggatgctgacgctcgggtcttattgcaaaaaaggccgagggaaggctggctaaccacggatgcatttctttactgggcgcagcaggatttctccggtgtgaagccactggttgctcaggtgaaaaggcatctctttccctatagccgctattttacgctgagtacggaaagtatcagcgacgaacaatcccagggatggcaaagccatatttttttcaaccgtaaacagcagagcgcccaaatctatcggcgtacgctgcaactctactaatcataaggatcgtgatgcctgaatcgttgatggtcatacgttcttcctcgacgctgcgtaagcattgggaatggatgacgttctccgcagatagcgtatcttcggtacatacgctcacggacgatcttccgctggagtcgctggccgatcagcccggtgccggaaatgttcatcttttgatcccaccagagggccttttatatcgttccctcacgctgcccaacgccaaatacaaactcaccgcacaaacattacaatggctggcagaggagacgttacccgacaacacccaggactggcactggacggttgtcgataaacaaaacgaaagtgtcgaggtgataggcattcagtcggagaaactcagtcgctatcttgagcgtttacatactgccggactcaacgtgacgcgggttttgccagatggctgctatcttccctgggaagtagatagctggactctggttaaccagcaaacaagctggctcattcgcagtgccgcacatgccttcaacgaactggatgaacactggttacagcatcttgctgcccagtttccgcctgagaatatgctttgttatggtgtagtacctcacggcgttgcagcggccaatccacttatccagcatcctgaaataccatcactgagtttgtattctgccgatattgcattccagcgctatgacatgctgcatggtatttttcgtaaacagaaaactgtaagcaaatcgggaaaatggctcgcccgcctggcagtaagctgtctcgttctcgccattctttcttttgttggcagccggagcatcgcgctctggcatacgcttaagattgaagatcaacttcagcaacaacagcaagaaacctggcaacgttatttcccgcagatcaaacgcacccacaattttcgtttttactttaagcagcaactcgctcagcaatatcctgaagctgtgccgttgctctatcatttacaaacacttctgctggaacaccctgaactgcagttaatggaggcgaactatagccagaagcaaaagtcgctgaccttaaaaatgagtgctaagagtgaagctaatatcgatcgtttctgtgagttaacacagtcctggcttccgatggaaaaaacagaaaaagatccggtcagtggtgtatggacagtaaggaactcagggaaatgattaaatcatggtgggcagaaaaatccacatcggaaaaacagatcgttgcggcactggcggttctctcgctcggcgttttttgttggcttggggtgataaaaccgatagatacctacattgcagagcatcagtcccacgcgcaaaaaattaagaaggacatcaaatggatgcaggatcaagcgagcacccatggtttactcggtcatcctgcgcttacgcagcccatcaaaaatatccttctcgaggaagcaaaacgtgagaatttggctatcacgctggaaaacggcccggacaatactctgacaattcatcctgtcacagctcccctcgaaaacgtctcccgctggctcactacggcacaggtaacatacggtattgttattgaagaccttcagtttactcttgccggaaacgaagagatcaccctcaggcatttgtccttcagggagcaacaataatgacaatgctactgccgctcttcattctggttggttttattgcagattattttgttaatgccatcgcctatcacctctcgccgttggaggataaaacggcgttaacgtttcgccaggtattggttcatttcaggcaaaaaaaatatgcctggcatgatacagtgcccctgatactttgtgttgctgctgctatcgcctgcgccctggcacctttcacgcccatcgtgactggcgcactctttctctatttctgtttcgtactcacgctcagtgttattgattttcgcactcagctcctgcccgacaaactcaccttaccgctgctctggcttggcttggtatttaatgcgcagtatggattaattgatttacatgatgcggtttacggcgcggtagcgggctatggggtgctgtggtgtgtttactggggcgtctggttagtttgtcacaaagagggattgggctacggtgatttcaagctactggccgctgcaggcgcatggtgtggctggcaaacgttgccaatgatactgctgattgcctcgctgggtggcattggttacgccatcgtttcacaacttctgcaacgccggactataaccactatcgcattcggcccgtggcttgcgctcggcagcatgataaacctggggtatctggcctggatctcttattaaccgggagggttctccctcccgacacggctcaaccttcttcgcggatctgtgcttgcagataattttgcaggcccatcttctgaatcagatcaagttccgtttccagccagtcgatatggccttcttcatcacgcaaaatttctatcatcatatcgcggctgacgtaatcatgaacgctatcggcataaccaattgcctcacgcaaattcttcgcgccatccagctcaagtgccagatcagaacgcagcatttcctcaacatcttcaccaatgttcagtttgcccaggtcctgtaagtttggaagaccttccagaaaaagaatgcgctcaatataacgatcggcgtgtttcatctcatcaatggattcatgatactccacatcattgagacgtttgagaccccagtttttaaacattcgggcatggagaaagtactgattgattgcgacaagctcatttcccaacagtttgttgagataatttataactttagtatcacctttcattttttgactccttcgcttccactctttgaagagtagaacggcttacgagtaagtcaaaaaacacactccgtttatgcggactccttaaactccggcagctgcattaattcatcctccatcacttcacgcgcggcccggacacatttaccgcactgattgccgaccggaataaatttttttaattgctggaacgagtgaggggaaaactggcgcacagcctgacgaatttttttatcgctgataccattacaaagacaaacgtacatagagactcccgtatactttcttcaaaaataaatgaaaatagttcttatttcaattacggaaagactcttttttaagcaaagaatagaaatatgaataaaaataatgggctaccaaaagtagcccattgacaaaaaatgcggcgatactggaaggtatcgccaacacatttattgcttagtaaacggcgcgaagatttcgctaaatgcgtacttcggtgcctgttctttagtcaggccgtggaattccggagacaggttagtgccgcccggcaggtcgcgcgcgattgaccagataccaaccataccgagattacgcttctgcgcatcctgcatgaccagacgagcatcagagagatagaacacctcgccctgaacgtcgttcacgccaaccatcggcgtggtacccatcatagcgtcaatttctgcatcgctcttattgggatggaggcctttcaattgtgaatgcaggttggcaatcgcagacgttgcacacttaccgtgaatgttctggccttcggtatttgcagactgacaaatcgcgttaccgtagtccattgtcatcacgttcacacccgccagctcaacacctttcgctttggcatcgctcaggacattcatcccttccggcgtcaggccagtcggcagaattggcaaggtgtaccagatagcaatatctttgccttctgacttccatttatcctgcactttcttcacagcaaggttacgacgttcaatagatgcctgatccgcaacccaggtgccttcgatatcgaagtccaggactttgaggttcaggttatcaacgatgtcataataatgctgcatcagatcgtctacgttcttacaggaagcagccagcggagcgttgttagcaccaccgatagacagcatcacatcgccgccagcctcacgcagagctttgattttgctgtactgagcgtaattctgcataccgtaagcggtaccccatgtcggcagacaggtgttcgcatctttactcaccacaaacgccagcgtgaagtggttgacgttatgattcttagccagcgcagccagatccgggatcgtattcagcgtaaagtcgacatacggtgcataaacgtgtttcggccacgctttcttcggcgtacctacgcgctctttggttccggtccagtcaacaaaaacacgccacgggttgctgtcagaaggagaaactttctgcactttactctgagaaatgtagttcacaccgttaaagcgaatcagcgtatcgctggcataaagcgtttctggattaaactgcggcgcattattcagctcttcgttgctatagctctgagccttacctaacggcttccacgggcggctattgctaccggtggcgttttggttcgccaccagagcagggttgtcactttgcgtccagaacagcgcttcataagcctgcccatcaacaacaacgcgatcacctttcacgtacacagtggatgcggaccatgctttcgccggttcgtatttcttccacgggttatcgccgcccgggacaaagccccatgcgtcttgatcgacagaagttttataatgtgcatcgttataatctacgatgctgtccgcgctgtacgctttgctggcctggaaaccatccgcaacaatgacgccgccgttatcaatttcacaggtagtcgggttaccgtactgactcaattccgcagcggtagctgtacgctcgagacgccatgggttattggagttttcagcgctggtaccccgtgggcaatctttagacccaacccaccaggcgttcttgtaaacattaccattgaaaataacatggtaaatttcgctaccttcctggccgctccacgcttgcaatgagtaatcgttaacgctatccgctggtgttgatggctcgctgttatccggagttggggtcaccggtgtttccggagttggatcaaccggagtcacagcaccgccattattatccggcttaacggaacaggagccagggttaccatactggctgatttctgttgccgttgccgcgcgaacataacgccatgggttactggcatcgttttctttcgcatcgcctgggcaatttgccgcgcctacccaccaggcgttcttataaatgccgccgttatagataacgtaccatgtagaagaaccttcctgacctttccaggctactacagcatagttgtcgtttgacttatcagctggggctggctgaacatcaggagccggtttaacgtccggtgccggtttcacatccggtgaaggctgtggtgctgaagtacaggactgtggattactggtttctgagatttccgttgccgtagcggcacgaacataacgccatgggttgctggcatcattgcttttcgcatcacccggacagttagaagaggctacccaccaggcatttttatataccgcaccattaaagacgacataccaggtctgaccgccctgctgtttattccaggcaactacagaagaattagacggaacagtgccctgtgctggtgtagccgaaccgccattagccggcgtattggatgcaggcgtatttgaatttgaagaagatgagctgccgctcttttcgcaggaaagtgtattgccaaactgactaatttcagcagctgttgcggtacgctttaaacgccacgggttagttgcatcatttgctttcgcttttcccgggcaatttgtagaagaaacccaccaggcattttcataaattttgccatcgaaaataacctgatatttattaccaccttgttggttattccatgcttccattgccaatgctggcagagcggaacacaccagccccataccaatcatagatttagtaaatatatttaatttcattataatcccttgtgacgtaaaaactgcaaaacaaaagtcctacgcaggaattatttacgttttacgagaacccttcaatatgaattaaattacggcattaaaaataagaaaaaagcctgacaaatgaagcattttaaaaacagaaacattcatatttaaaatgttaaattgaattgatattttaaatatgaataatttattcgttctgacagtacgaataagatatgccgtcaacaaatgcaaaaagggcgccgaagcgcccttttcaattcaaaactaattaacgtgtaattagcccagaactttagcaacaacgcccgcgccaacggtacggccgccttcacggattgcgaaacgcagaccgtcgtccatcgcgatcgggtggatcagggtaacaaccattttgatgttgtcgcccggcattaccatctctacgccttccggcagttcgatggtaccagtcacgtcagtagtacggaagtagaactgcggacggtagcctttgaagaacggagtatgacggccgccttcatctttggacagaatgtacacttcagattcgaacttggtgtgcggcttgatggtgcccggcttagccagtacctgaccacgttcgatttcttcacgtttgataccacgcagcagaacacctacgttctcaccagcacggccttcgtccagcagtttgcggaacatttcaacgccagtacaggtagacttctgagtctctttgataccaacgatttcaacttcttcaccaactttgatgataccgcgttctacacgaccggtaacaacggtaccacgaccggagatggagaatacgtcttcgatcggcagcaggaacggcttgtcaatcgcacgctctggttccggaatataagaatccaggaagccagccagttccaggattttcgcttcccactctgcgtcgccttccagcgctttcagagcagaaccacgaacgatcggagtgtcgtcgcccgggaagtcgtactgagacagaagttcacgaacttccatttcaaccagttccagcagctcttcgtcatcaaccatgtcgcatttgttcaggaacacgatgatgtacggaacgcctacctgacgacccagcaggatgtgctcacgagtctgcggcatcgggccgtcagtcgcagcaactaccaggatcgcgccgtccatctgagcagcaccggtgatcatgtttttaacatagtcggcgtgccccgggcagtctacgtgtgcgtagtgacgggtcggggtgtcgtattcaacgtgagaagtgttgatggtgataccacgagctttttcttccggcgcgttatcgatctggtcgaatgcacgagcagcaccgccgtaggttttagccagtacggtggtgattgcagcggtcagagtagttttaccgtggtcaacgtggccgatagtaccaacgttaacgtgcggttttgtacgttcaaatttttctttagacacggctatattccttactatagtgctctccccttcaggagagagcacgggactttggtattaacccttaggcttatttaccacgggcttcaattacggcctgagcaacgttactcggcgcttcatcatacttcaggaattccatagtgtatgatgcacgacctttggtcagagaacgcagctgagttgcgtatccgaacatttcagacagcggtacttcagcgtggatcttaacgccagtaacttcagattcctgacctttgagcataccacgacgacggctcaagtcaccgataacgtcaccggtgttctcttccggagtttctacttcaaccttcatgatcggctcaagcagaactggtttcgctttcttaaagccttctttaaaggcgatagaagcagccagtttaaacgccagttcagaggagtcaacgtcatggtaagaaccgaagtgcagacgaatacccatgtctactaccgggtagcctgccagcggacctgctttcagctgttcctggatacctttatcaacggccgggatgtattcgccagggattacaccacctttaatgtcgttgatgaactcgtagcctttcgggtttgaacccggctccagcgggtacatgtcgataacaacatgaccatactgaccacgaccaccagactgtttcgcgtgtttaccttcaacatcggtaactttctggcggatagtttcacggtaagcaacctgcggtttacctacgttcgcttcaacgttgaattcacgcttcatacggtcaacgatgatgtcgaggtgcagttcgcccatacccgcgatgatggtctggttagattcttcgtcagtccatacacggaaagacgggtcttctttagccagacggcccagagccagacccattttttcctggtcagctttggttttcggttcaactgcgatggagattaccggctcagggaattccatacgttccagaatgatcggcgcatccgggtcacacagggtgtcaccagtggttacgtctttcagaccgatagcagcagcgatgtcgcccgcgcgaacttctttgatctcttcacgtttgttagcgtgcatctgaacgatacgaccgaaacgctcacgtgcagctttcacggagttcagtacggtatcaccagagttaaccacaccggagtaaacacggaagaaggtcaggttaccaacaaacgggtcggtagcgattttgaacgccagtgcagagaacggctcgtcatcacttgcgtgacgttcagccggagtgtctttaccgtcgtccaggataccgttgatcgcaggtacgtcaaccggggatggcaggtaatcaattaccgcatccagcatcgcctgaacacctttgttcttgaacgcagaaccacaggttaccaggatgatttcgttgttcagaacgcgctgacgcagagcacctttgatttctgcttcagtcagttcttcaccacccaggtatttttccatcagctcttcagaagcttcagctgcggattcgatcaggttctggtgccattcgttagccagttcaaccatgtctgccgggatatcttcgtattcgaaggttacgccctggtcagcgtcgttccagttgatagctttcattttcaccaggtcaacaacaccggtgaaatgttcttcagcaccaatcgccagctgcagcggaaccgggttcgcgcccagacgggttttgatctggttaacaactttcaggaagttcgcacccatgcggtccattttgttaacgaacgcaatgcgcggaactttatatttgtttgcctgacgccatacggtttcagactgcggctgaacaccaccaactgcgcagtaaaccattaccgcaccatcgagaacacgcatggaacgttctacttcgattgtgaagtcaacgtgccccggggtgtcgatgatgttgatgcgatgcggctcatactgcttagccataccagaccagaatgcagtagtcgcagcggaagtgatggtaataccacgttcctgctcctgctccatccagtccatggttgcagcgccgtcatgaacttcaccgattttatggtttacaccggtgtagaacagaatacgttcggtagtagtggttttaccggcgtcgatgtgcgcactgataccgatgttacggtagcgtgcgatgggtgttgtacgagccatttgtttcctcgtttatcttttaggcgttcaatttaagtagcccaaagcgggctgcttactggaagcgcccgcctggtgactaaaactccgaagggataaccaacggtagtgtgcgaacgccttgttggcttcggccatacggtgaacgtcttcacgtttcttaactgcagtacctttgttttctgcagcatcagaaagttcgttcgccaggcgcagagccatggatttatcaccgcgtttacgagcagcttcaacgatccaacgcattgccagagcattacgacgaaccggacggacttcaactggtacctgataagtagaaccaccaacgcggcgagacttaacttctacagtcgggcgcacgttttcgagagctacttcgaatgcttccagttcagatttaccagagcgctgagccagggtctccagcgcgctgtatacgatagattcagcagtagattttttaccatctaccatcaggatatttacaaatttagccagcagttctgatccgaacttcggatccggcagaattttacgctgaccaatgacgcgacgacgtggcatggaaatactccgttgttaattcaggattgtccaaaactctacgagtttagtttgacatttaagttaaaacgtttggccttacttaacggagaaccattaagccttaggacgcttcacgccatacttggaacgagcctgcttacggtctttaacgccggagcagtcaagcgcaccacgtacggtgtggtaacgaacacccgggaggtctttaacacgaccgccacggatcaggatcacggagtgctcctgcaggttgtgaccttcaccaccgatgtaggaagtcacttcgaaaccgttagtcagacgaacacggcatactttacgcagcgcggagttcggttttttaggagtggtagtatatacacgagtacatacgccacgtttttgcgggcatgcttccagcgcaggcacgttgcttttcgcaactttgcgagcacgtggtttgcgtaccagctggttaactgttgccattaaatagctcctggttttagcttttgcttcgtaaacacgtaataaaacgtcctcacacaatatgaggacgccgaattttagggcgatgccgaaaaggtgtcaagaaatatacaacgatcccgccatcaccaggccatctggctggggtgcttaaccgtaagtctgacgaaatcagtatagtcaatgagaatgatgtcgttcgaaatttgaccagtcaaaccgcgggcaataaggtcttcgttcagggcatagaccttaatgggggcattacgcagactttcaaggtagcggttaccgtcaactgcggcagttacgccatcttgcaataatagcagttcgtctccttcactgagcagacgcagcagcgcagcaaaatccgtcagccagggtgagcgatgtaatgtgtgcagcataaacgcctcaaaacctcaaaataacatcgtagttggcgagttcgcggcgtaaggcatctgcttcgagcggcgtggcttcgacaacaaagggtgtctgcggatctaacccgcgttcgcgcagtgaagccgcacaaacccagcactgttcaatgtcgtacagacccaacaatttaaaagtggcaatgtaatcacgcgccagcactgcatcgggcttttgtcctggcagcagctgaaaaacgccatcagctataaagaagacagccagatcgtcagttaatgcggaagttgccagtaaagcatctaaaccttcccggcctgcggctgtaccatgaggtgcagtagaaaaaacaaacgcaattcgtttcatcagaactgtaccaccctgtcacaggtcagcgaggcttccgccagcgccccaagtccgcttaaggtaaatccctgctgaaggtttgacgaagccagccccagtcttccggcctccgtttcatcaacaacgccacggcgtaatgctgccgctacgcagatattcagcgccacaccatgttgcgcattcagttgttgccaggcccgtacgaggtcaaattcgtcacttgccggagaggtcaattggttagcgttatagaccccttcccgatagaaaaagacgctgcttaactcatggccatctgctatcagcgcctgcgcaaactgaaaagcactactcgcctgttgcgtaccgtatgctggcccggtcaccacgatggcaaaacgcattacttatcttgcccctggaaatcaccgctcttgaactggcggatgtagagatagacagtgtgtttggagatgttcaggcggtcagcaacctggttgatcgcatctttaatatcgaagatccctttctcgtagagattcagcacgatctgacgatttttggcgttattagaaacattgcgatcggcattcacttcttcgatggtgaactccagcgtttgggtaaccagatcttcaacagaagaggcaaagttgacgcttgaaccgacatccggggtttctggcggcacaaaggtgctcataatctgcgagaagggaacatcaagattcatattgatgcacagcagaccaattacacgctgttcgcggttacgaatcgcgatagtcagggacttcattaatacgccgcttttggcgcgagtaaagtagcatttagaaacgctgctatccgctcccgtcatatcgtgcagcatacgtagcgccaggtcagtaattggcgaaccaatcttccggcctgtatgttcaccgttagcaatgcgaatggctgaacattttagatcctgcaaagagtgcaaaacgatttcacagtgggagccaataagcatcgctaacccgtccaccaccgcttcgtaggatttcagaatatcaaaatcggtctggtcgaaaggacgttgatccagtaaatccaactcactggtttcgttggttaaaagcgacctggacatgaaaaaaaacactccttttcaggagcctgtcgttaacttttcagggcaggctcattaatgatgcgggtaactaaattaatacagcggaggttccgctttccagcactaattatatccggcctgtaataaaaaaaccgccgcctggtcaggcggcggttcttaatgcttattttttagcagaatctgcggctttcgcatcagcttccggctttgcatcagccttcggcgctggtttcacatccagcagctctacgtcaaacaccagggtagaattcggtgggatccccggaacacccgctttgccgtaagccagttctggtggaataaccagtttgatcttaccgcctttcttgatgttcttcagaccttctgtccaacccgggataacaccgtccagacggaaagaaagcggttcaccacgggtgtaagagttgtcgaactctttaccgtcgatcagcgtacctttgtagttcactacaacagtatcgctgtctttcggtgcttcgcctttaccggcttctactacctgataaaccagaccagttgaagaggttttcacacctttctctttggcaaatttctcgcggtactctttaccttttgcttcgttatcagccgcgtctttttccatcttcgcctgagcagaagacttcacgcgagcttcgaatgcttgtagagtctgttcgatctcttggtcggagagtttgctcttatcagcaaatgcatcctgaacaccagcgatcagctgatctttatccagtttgatgcccagtttttcttgttcttttagagagttttccatgtaacgacccagcgaggcacccagtgcataagctgatttctgatcgtcatttttgaacgctgctttgctgtcagcagctgtagcaggttttgcagcttcagcagcaaaagtgattggtgcatgcagggcaacggccattgtggtcgccagcagcgttactttaaacagtgatttcatccatatctccaggatcggggcatctcaccccagggttaactattatcagaagggtactataaagcgttgtcgaacaaatctacatacagacacgccctattatcatctattttcagactctttttgtttaaattagtttcgatgaccgcgaaatgagtgctgtctcgggcagcaaagttaagtagaatccgcggcgaccattcgacaaaagaggtgaatcatgcaggatttatcattggaagcacgcctggcagagctggagagccgactggcttttcaggaaatcaccattgaagaactgaacgtcacggtgaccgctcatgaaatggagatggcgaaactgcgcgatcatctgcgtctgctgaccgagaagttaaaagccagccagccgtcgaacatcgcgtcgcaggctgaagaaacgccaccgccacattattgaggcgtaaaaaaagcggggattccccgcttttttgtcactttttcggtattagtggcaaccgcaaccgccgttgcctttaccgccacagcagccttcgccaccgtgttcatgaccgtgatcgtggccatgaccgccgcagcaaccgtcgtggtcgtgatcgtggtggtgatcgtgcgcgccgtgaacgtgaccatgagccagttcttcttcagtcgcttcgcgaatcgccacaacttcaacgttgaatttcaggttctgaccggccagcatgtggttaccatcaaccacgacgtgatcgtcttcaaccgcagtgatttcaaccggtaccggaccctggtcggtttcagccaggaaacgcatacctacctgcagttcatcaacgcccataaatacgtctttaggaacacgttgcaccaggttttcgtcgtactgaccgtaagcgtcgttcgcgccaacagcgacatcaaatttgtcgccaacttcatgaccttccagcgccgtttccaggccagagatcagggaaccgtgaccatgcaggtagtccagcggcgcactcaccggagactcatcaaccaacacaccgtcttctgtacgtacctgataggccaggctgaccaccaggtcttttgctactttcatgatatctcctgagcatgggaagaatagtggcgcagattgtagcggaattctgcagccgtgtactcactagcttaaaaaaactcggcgcatatcgctagtccggatgaaaaatcccgatcacttgctcatctttgcgaacgtgatcgcgggcttctttgtctgcttctcgcatctgatgtccgcacttaacacattcaacaatatcaatattattttcgcgccacatcgccattgaatcctgcgcctgacaggccgggcattttgcgcccgcaataaaacgttttcggattgccatctttaccctctactcaaattcatcccagccgtccagctggcgtcgttcttgttgcatttcacgctggaaaatctcttccagttcgcgtcgggcttccctggcgcgagaaatttgtacggtatcggcatgcattgggatgagctctcgcagcatccgcatatccaggcggcgaaaatgcagttgcgctcgctgtgcctgatgcggatgcatgccaagcgtgaccagcgtcttgcgccccagctctaacgcactggagaatgtttcacgggaaaactgcgtcacccctgcctgtaataactcatgcgcttccacacgtccgcgcgctcgcgcaagaatatgcaaatgcggaaagtgctgttggcatatttccaccagcttcatggtgtcttccggctcgttacaggtaatgacgatagactcagcggcctctgcacccgcagaacgtaaaagatcgacctgcgtggcgtcgccgtaataaactttgtagccgtatttacgcatcaggttaacggcgctgatatcccgctccagcacggtaatgcgcattttatttgccatcagcaaacgaccaatcacctgaccaaaacgcccgaagcccacgacaatgacctggggtttatcatcgttgacccacggtttttcgtcttcttcttccggtccgttaaactggcgggatagccatttatccaccagcttcatcagcaacggcgtggtcatcatggaaagcgtcaccgtcaccagcaacaacgccatctggtcgccctggaataagcgttgtgaagaagcggtagaaaagaggacaaaggcaaactcaccaccctgactcaacacgccagcaaactgcatccgctctgagctacgcacgccatacaatcgcgccagcagatacagcacgagaattttcaccgccaccagcacaaccacgcttatcactacccacaacagatgggtataaagcaccccgaggttgagtgacatgccgacagagataaagaacaaaccgagcagcaagcctttgaagggatcgatagccgtttccagttcatggcgatattcactttccgccagcagcacgcccgcaataaatgtaccgagcgccatcgacagccccagcgcatccataaacaatgcggaacccaacaccagcagcagcgtcgcggcggtgaacacttcccgcacgccagaagctgcaataaagcggaataccggacgcagtaaatagcgcccaccaatcagcatgccgacaaacgccagcaccttcatgccgaccttcatccagtcgaaatgttcgtctgccgaccccgccaacaacggcactaacgccagtgctgggattactgccagatcctgaaacagcagaaccgaaaacccgagctggccggattcgctgcgattcatccctttctcacgcatcaattgcaacgccattgcagttgaagacatcgcaaggccaatgccaccgaccaccgccgcctgccaggcgaaatccgtcagcatcaataatcccgccagcaacgccgcgcttaacagcacctgtgccgcgcctacgccaaaaatcgaacgccgcagttgccaaagtttggagggattcaactcaaggccgatgataaacatcaggaataccacgccgagttccgaaaagtggaggatctcatcgacgtcgctaataaaccccagcccccacgggccaattgcaatccctgccagcaaatatcccaacacagcgccaatacccagccgcgatgccagcggcaccgcagccaccgccgcgaagagaaacagcactcctgcgagtaaaaaatcggaaccttccatcagcggcctcctggagacagcggatttgccagccagtcaccgtaggctctggcgtggctcgccagctcctgtgcgctttgccgtctcgcccagtaaataatgatgggacttaaccaatgcatccggcacatgcccgccgccagttcaaaggggcgcagcacatcgctcatcgggtagcgattcagcgcgtcataacggtaagcactttccggctcgccggtggtaatcacgctacgccagtactttcccgccagttggtttcctcccggcccgctggcaaaaccacgacttaatacccggtccagccactctttcagtagcgccgggcagctataggtataaagaggatgctgaaagacaatcacctcgtgctcgcgcagtaatgcctgctcacgggggatatcaataaaaaaatcgggatagtgcgcgtaaaggtcgtgcacggtaacattgctgagctgcgtggccggtttaagcagtacccggtttgccaccgagtcctgagattccggatgggcatacagcagcaaaactttcgctggctgagacatcatccccctcccggtatggtttttgtgtatagtcgctgttttgggctaccattgcgcccggtgcggcagctcgcccatacattacattatcataatgataagttaacatagtctgaacatacggcaccttatgattgttttctcctcgttacaaattcgtcgcggcgtgcgcgtcctgctggataatgccaccgccaccatcaaccctgggcagaaagtcggcctggtgggtaaaaacggctgtggtaaatctaccctgctggcattgctgaaaaatgaaatcagcgccgacggcggcagctacacctttccgggaagctggcaactggcgtgggtgaatcaggaaacgccggcgttaccgcaagcggcgctggaatatgtcattgacggcgaccgtgaatatcgtcaactagaagcgcagctacacgacgccaacgaacgtaacgacgggcacgccattgcgaccattcatggcaagctggatgctattgacgcatggagtattcgctcccgtgctgccagcctgctgcacggcctcggtttcagcaatgaacaactggagcgcccggtaagtgatttttccgggggctggcgtatgcgtcttaaccttgcccaggcgctgatttgccgttcagacttgctgctgctcgacgaaccgactaaccacctcgatctcgatgccgttatctggctggaaaaatggctgaagagctatcagggcacgctgatcctgatctctcacgaccgcgacttcctcgatccgatcgtcgataaaattattcatatcgaacaacaaagcatgttcgagtacaccggcaactacagttcgtttgaagtacagcgcgccacccgtctggcgcagcaacaagcgatgtacgaaagccagcaggaacgcgtagcgcatctgcaaagttatatcgaccgtttccgtgccaaagccaccaaagcgaagcaggcccagagccgcattaagatgctcgagcgtatggagctaattgcccccgcgcacgtcgacaacccgttccgctttagcttccgcgcgccggaaagcctgccaaatccgttactgaagatggaaaaagtcagcgcgggctatggcgatcgcattattctcgactcgattaaactgaacctggtgcccggctcgcgtattggtctgttaggccgcaatggcgcgggtaaatcgacattaatcaaactgttagccggtgaacttgcgccagtcagcggtgaaattggtctggcgaaagggatcaaactcggctacttcgcccagcatcaacttgaatacctgcgcgccgacgaatcacctattcaacatctggcacgtttagcgccgcaggagctggaacaaaaactgcgtgactacctcggcggctttggtttccagggcgataaagtaaccgaagaaacgcgccgcttctccggtggggaaaaagcccgcctggtgctggcattaattgtctggcagcggccgaatctgctgctgctcgacgaaccgactaaccaccttgacctcgacatgcgtcaggcactcaccgaagcattaatcgagtttgaaggcgcgctggttgtcgtttcgcacgaccgtcatttgctgcgttccaccactgacgatctctacctggttcacgatcgtaaagtcgaaccgttcgacggcgatctggaagattatcaacagtggttgagcgacgtacaaaagcaggaaaaccagaccgacgaagcgccaaaagagaatgcgaacagcgcccaggcacgtaaagatcagaagcgtcgggaagctgagctgcgtgcgcaaacccagccactgcgtaaagagattgcccgtctggaaaaagagatggagaagctgaacgcgcaactggcgcaggcggaagagaaactcggcgacagcgaactgtatgaccagagccgtaaagcggagttgaccgcctgcctgcaacagcaagccagcgccaaatccggcctggaagagtgcgaaatggcatggctggaagcccaggagcagcttgagcagatgctgctggaaggccaaagcaactgatggcgcagataacgacgaccgatgccaatgaattcagcagcagtgctgaattcatccccatgcgcggctttagcaattgtcatctgcaaaccatgctgccgcgtctgtttcgtcgtcaggtgaaattcaccccgtactggcagcggctggagttgcccgacggcgattttgtcgatcttgcgtggagtgaaaaccctgcacaggcgcaacataaacctcgtctggtggtgtttcacgggctggaaggcagtctcaacagcccttacgcccacggtctggttgaggcggcgcaaaagcgcggctggctgggcgtggtgatgcattttcgcggatgcagcggtgaaccaaaccgtatgcaccgcatttaccattcgggcgaaaccgaagacgccagttggtttttacgctggctgcaacgcgaatttggtcatgcgccaacggctgccgtcggctattcgctcggcggtaatatgctggcctgtttgctggcaaaggaaggcaatgatctcccggttgatgcggcggtgattgtctctgcgccgtttatgctggaagcctgtagctatcatatggaaaagggcttttcccgcgtttatcagcgttacttgctgaacctgttaaaagccaatgccgcgcgcaagctggcagcctaccccggaacgctgccgattaatctcgcgcagttaaaatcggtacgtcgcatccgtgaatttgacgatctcatcaccgccagaattcacggctacgccgacgctatcgactattatcgtcagtgtagcgccatgccgatgctgaaccggatcgccaaaccgacgctgattattcacgccaaagacgatccgtttatggatcatcaggtgatcccgaaaccggaaagtctccccccgcaggtggagtatcaactgactgaacatggcggtcatgttggctttattggcggtacattacttcatccgcaaatgtggctggagtcacgcattcctgactggttaacaacgtatctggaggcgaaatcatgttgattccgtggcaagacctctcccccgaaacgctggaaaatttaattgaaagctttgtgttacgtgaaggcaccgattatggtgaacatgagcgtacacttgaacagaaagtcgccgacgtcaaacgccagctacagtgcggagaagcggtgctggtatggtcggagctgcacgaaacggtcaatattatgccgcgcagtcagtttcgcgaataacctgcaaccgtcggcggacgagataataatgatagctaagtcatggagttactatgtctgccaaacatccggtcattgcggtaacaggatccagcggcgcggggaccaccaccaccagcctcgcgtttcgtaaaatattcgcgcagttaaatctgcatgcagctgaggtggaaggcgacagttttcaccgttacacccgcccggaaatggacatggcgatccgcaaagcgcgcgacgccgggcggcatatcagctacttcggccccgaggctaacgacttcggcctgctggaacaaaccttcattgaatacggtcagagcggcaaagggaaatctcgcaaatatctgcatacctacgacgaagccgtaccgtggaatcaggtaccggggacattcaccccctggcaacctttaccggaacccactgatgtactgttttatgaaggtttacacggcggcgtagtcacgccacagcataacgttgcgcagcatgtggacttactggtcggcgtggtgcctatcgttaaccttgagtggattcaaaaactgatccgcgacaccagcgagcgcgggcactcacgagaagcagtgatggactcagtagtgcgttcaatggaagactatatcaactacatcacaccgcagttttcccgcacccatcttaacttccagcgcgttcccaccgtcgacacttcaaacccgttcgcggcaaaaggtatcccgtcgctcgatgaaagctttgtggtgatccattttcgtaatctggaagggatcgatttcccctggctgctggcgatgttgcaaggctcattcatttcccacatcaatacgttagtggtaccgggcggcaaaatgggtctggcaatggaattaattatgctgccgctggtgcaacgattgatggaaggaaagaaaatcgagtaactctgctattacgccggataaaatactatccggcttcacaacgggatagttaagtcacgcggcaaccacttcatacgagtgagtaatattcaccgctttttccagcatcaacgccactgaacaatatttctcggcagagagatcaaccgcacgcgcaaccgctgcgtctttcaggtcgcgaccggtgacgataaaatgcagattaatgtgcgtaaacaggcgtggtgcctcttcgcggcgttcagaggtcaattttacttcacaatcgaccacatcctgacgccctttttgcaggatcgaaaccacatcgatggcactgcaaccacccgccgccatcaacaccatttccatcggacttggtgctttatcgcctgagttgccgtccattaaaatctgatgaccagaggcggattcgcccagaaaagttaacccttcgacccacttcactcgcgcttgcatttttgctactccactgcgtcaattttcctgacagagtacgcgtactaaccaaatcgcgcaacggaaggcgacctgggtcatgctgaagcgagacaccaggagacacaaagcgaaagctatgctaaaacagtcaggatgctacagtaatacattgatgtactgcatgtatgcaaaggacgtcacattaccgtgcagtacagttgatagccccttcccaggtagcgggaagcatatttcggcaatccagagacagcggcgttatctggctctggagaaagcttataacagaggataaccgcgcatggtgcttggcaaaccgcaaacagacccgactctcgaatggttcttgtctcattgccacattcataagtacccatccaagagcacgcttattcaccagggtgaaaaagcggaaacgctgtactacatcgttaaaggctctgtggcagtgctgatcaaagacgaagagggtaaagaaatgatcctctcctatctgaatcagggtgattttattggcgaactgggcctgtttgaagagggccaggaacgtagcgcatgggtacgtgcgaaaaccgcctgtgaagtggctgaaatttcgtacaaaaaatttcgccaattgattcaggtaaacccggacattctgatgcgtttgtctgcacagatggcgcgtcgtctgcaagtcacttcagagaaagtgggcaacctggcgttcctcgacgtgacgggccgcattgcacagactctgctgaatctggcaaaacaaccagacgctatgactcacccggacggtatgcaaatcaaaattacccgtcaggaaattggtcagattgtcggctgttctcgtgaaaccgtgggacgcattctgaagatgctggaagatcagaacctgatctccgcacacggtaaaaccatcgtcgtttacggcactcgttaatcccgtcggagtggcgcgttacctggtagcgcgccattttgtttcccccgatgtggcgcagactgatttatcaccccgatatcaactatgcacttcgacaaacgctggtgctatgtttgcccgtggccgttgggttaatgcttggcgaattacgattcggtctgctcttctccctcgttcctgcctgttgcaatattgcgggccttgatacgcctcataaacgttttttcaaacgcttaatcattggtgcgtcgctgtttgccacctgtagcttgctgacacagctactactggcaaaagatgttcccctgccctttttgctgaccggattaacgctggtacttggcgtcactgctgagctggggccattgcacgcaaaattgcttcctgcatcgctgctcgccgccatttttaccctcagtttggcgggatacatgccggtctgggaaccgttgctcatctatgcgttgggcactctctggtacggattgtttaactggttttggttctggatctggcgcgaacaaccgctgcgcgagtcactaagtctgctgtaccgtgaactggcagattattgtgaagccaaatacagcctgcttacccagcacaccgaccctgaaaaagcgctgccgccgctgctggtgcgccagcaaaaagcggtcgatctaattacccagtgctatcagcaaatgcatatgctttccgcgcaaaataatactgactacaagcggatgctgcgtattttccaggaggcgctggatttacaggaacatatttcggtcagtttgcatcagccggaagaggtgcaaaagctggtcgagcgtagccatgcggaagaagttatccgctggaatgcgcaaaccgtcgccgctcgcctgcgcgtgctggctgatgacattctttaccatcgcctgccaacgcgttttacgatggaaaagcaaattggcgcactggaaaaaatcgcccgccagcatccggataatccggttgggcaattctgctactggcatttcagccgcatcgcccgcgtgctgcgcacccaaaaaccgctctatgcccgtgacttactggccgataaacagcggcgaatgccattacttccggcgctgaaaagttatctgtcactaaagtctccggcgctacgcaatgccggacgactcagtgtgatgttaagcgttgccagcctgatgggcaccgcgctgcatctgccgaagtcgtactggatcctgatgacggtattgctggtgacacaaaatggctatggcgcaacccgtctgaggattgtgaatcgctccgtgggaaccgtggtcgggttaatcattgcgggcgtggcgctgcactttaaaattcccgaaggttacaccctgacgttgatgctgattaccaccctcgccagctacctgatattgcgcaaaaactacggctgggcgacggtcggttttactattaccgcagtgtataccctgcaactattgtggttgaacggcgagcaatacatccttccgcgtcttatcgataccattattggttgtttaattgctttcggcggtactgtctggctgtggccgcagtggcagagcgggttattgcgtaaaaacgcccatgatgctttagaagcctatcaggaagcgattcgcttgattcttagcgaggatccgcaacctacgccactggcctggcagcgaatgcgggtaaatcaggcacataacactctgtataactcattgaatcaggcgatgcaggaaccggcgtttaacagccattatctggcagatatgaaactgtgggtaacgcacagccagtttattgttgagcatattaatgccatgaccacgctggcgcgggaacaccgggcattgccacctgaactggcacaagagtatttacagtcttgtgaaatcgccattcagcgttgtcagcagcgactggagtatgacgaaccgggtagttctggcgatgccaatatcatggatgcgccggagatgcagccgcacgaaggcgcggcaggtacgctggagcagcatttacagcgggttattggtcatctgaacaccatgcacaccatttcgtcgatggcatggcgtcagcgaccgcatcacgggatttggctgagtcgcaagttgcgggattcgaaggcgtaatgcaggctaaaccatcggataaggcattcacgccgcatccgacatcttttgcctgatgcttcgtatttacgccccaaccaccttcgccaccgcgtgggcgaaacgttgcatcccttcatcgatatccgcatcttccaccaccagcgacggtgcaaaacgcatcacatccggtccggcattcagcaccattacgccagcctctgcgcccgcatacaggaaatcacgcgcccgacctttgtactgtggtttcagctctgcgccaatcaacagccccataccgcgaatatcgctaaatacatcgtactgctgatcgatcttctgcagatggtcaacaaaacgctggcgtttcgcctgaatgccttccagcacttcaggggtattgatgatatcaaacgccgcccccgctactgcacaggccagaggattaccgccgtaggtggaaccgtgagaaccaggatgaaacgcagaagcaatttccgccgtggtcagcatggcgctaatcgggaagccgccgcctaacgctttcgcagaggtcagaatatccggcgtaacgccgtagtgcatgtaagcaaacaaatcgccggtccgccccatcccgcactgcacttcatcaaacaccaataatgcctgatgttgatcgcacagctcgcgcaagccctgcaaaaactctggcgtcgctgccgtcacaccgccctcgccctggatcggctcaaccaccaccgcacaggtgtgatcatccatcaccgctttcactgcatggagatcgttaaagggaacgtggatgatgtctgccggtttcggcccaaagccgtcggaatattttggctgcccacccaccgaaacggtaaacagcgagcgaccatgaaaagcgttatggaaggcaataattttggttttgaacgggctatgacgcacacaggcgtaatggcgtgccagtttaaaggcggtttcgttagcttccgtgccggagttcataaacaccacgcgttcggcaaacgttgcctcaatcagtttacgcccaagacgcagcgccggttcattggtgaaaacgttactgatatgccacagagtttcgccctgggtttttaacgcgttcaccagcgcaggatggcaatggcccaacgccgtaactgcaatgccacccgcgaaatcgacatactccttgccttgctgatcccagattcggctgccctgaccttttaccggaataaactctgccggagcataaatcggcaggatcacttcatcgaaagtcgcgcgtgtaattgctgtttgttcaattgccatctcatgatcaccctgttacgcataaacaaatgtgaaattataaccacaaaatatgcataaaaaatcactaaatggcaatcagaaatcagcgatgcaggaaattagccagcagttgatgtccttgttcgctaagaatactttctggatggaactgcacaccttccagatcccactggcgatggcgaatccccataatctctcgggtttcgctccaggccgtcacgtcaaagcacgctggtaatgagtcaggttccaccaccagcgaatggtagcgtgtcacggtaagtggatttgccagcccccgaaatacgccctcaccgttatgtgtaatcggcgaggttttgccgtgcatgacctttgcggcgcgcacaactttaccgccaaatgcctgcgccattgcctgatgaccgaggcagacgccaagaatcggcaagcgcccggcatagtggcgaataacgtcaagggagatcccggcttcatctggcgtacaggggccaggtgagatgacaattttttgtggtttaagggcgtcgatatccgccagcgtcaacgcatcgttgcgcttaaccagcacatccgcccccagttcacaaaagtactggtagaggttccaggtaaaagaatcgtagttatctataagcaggatcatggcggctccggtacaaaagaaccgcgctattttactcagattccccggcttcgcttaccactttgctaaatatcatctgcagtgcggtgagatcccccattgccccactctgatttgcctgattccaggcctctttttcgataccctgccagctcagttgatatccggcatgaatcgccagttgctcgaagaagatccgctgtgccagaccacttcccacccggaagggatgcagcacgttgatttcacaatagtaatgcgccagccgctcgacgaacttcgctttctccaggccaaccagataaccttcttcctccagatcctgcatcagggcattgccctctttttcgatataagcaaagtggcagaacggcgtatcaccctgataaatatcaacttcacgcagttgccctgcccagtcgaaaatatcctgatacagctggcgatggatagttcgcaaatgcggtaaaccgcgcaccagcggaccaagctcaatggtcgcagcacgcagcgccgtcatttcgtaagcggcctgttccagccgctgctgctggcggatgttcagccggttacgcatgatatcaaggcctggataaagatacggatcgcgcccttcgccgaatttatcgctcatagtgactcctcagctcttcaaggcgcgctaaagcctctgcggcagtaagagtgactaaaggcatctcgacgccttcaagacggcgactggcctgaaaattacgattacgctgaagctcccagagacgggacttttgcttatcggtgagtttcttcacttgatgcctccctgaacgtgtccatttgccacaagtataagcggcaaatccgggttacgccgggagagcagaagcgcgggcaagattgcccgcgcgagaaatcattacggcaggactttagcggaaaggataactaccggttttgacggcacattctggtacggaccaacgtcatgagtcggcacctgggaaatcttatcggcaacgtccatgcctttcaccactttaccaaataccgcgtaaccgaaatcacgctgaccatggtcaaggaaggcgttatcggcaacgttgataaagaactggctggtggcgctgtctttgtcagcggtacgtgccatcgcgatggtgccacgcgtgttgcgcaggccgttatcggcttcatttttgattggcgggtttggttttttctgctgcatctgctcggtgaaaccgccgccctgaatcataaagccaggaatgacgcggtgaaaggtagtgttgttataaaaaccgctgttcacataatcgacaaagttttgcacagacactggcgctttttgtttatccagctccagttcgatgttaccagctgaggttgtcaacaatacgtgcgggtcccctttcgctgccattgctgcgggagaaagagcagaaagagcgaaaacagcagccatcgccgccagggtcgatttgaacatgagatttccttaacaaacagagcagaaaaaaagcaagtgaagagattctaaatagccttcaagaacaaggccatccctttacctaattttacgtatctgaaatatatgtaacctgacgatcactttttattccgtgatcaaaatcacctcttaaaatgcaatttagcaaccgattgcaataaaacatttaaacagatcacaaaatcacctaaaatcgcccgctcgcggcatatcccgctatgccattttatttttgaacgcaggccaatcatgactaacagcaatcgcatcaagctcacatggattagctttctctcctacgcactgactggtgcgttggttattgtcaccgggatggtgatgggaaatatcgccgattatttcaatctgcctgtttccagtatgagtaataccttcaccttcctcaacgccggcattttaatctctatcttcctcaacgcctggctgatggaaatcgtcccgttgaaaacgcagttacgttttggctttctcctgatggtgctggcggttgccggtttgatgttcagccacagcctggcgctgttctcggcggcgatgttcattctcggggtggtcagcggcatcaccatgtcgattggtacattcctggtaacacaaatgtatgaagggcgtcagcgcggttcccgcctgttatttaccgactccttcttcagtatggctgggatgattttcccaatgatcgccgcgtttctactggcgcgcagcattgagtggtactgggtttatgcctgcatcgggctggtgtatgtcgctatttttattctgaccttcggctgtgagttcccggcgctgggcaaacatgcgccaaaaacggatgctccggtagagaaagaaaagtgggggatcggcgtactgtttctctctgttgcggcgttgtgctacatcctcggtcagttaggttttatctcctgggtgcctgagtatgccaaaggcctgggcatgagcctgaacgacgcgggcacgctggtgagtaacttctggatgtcatacatggtcggcatgtgggcgttcagctttattcttcgcttctttgatttgcaacgcattctgaccgtactggctggtctggctgcgattctgatgtacgtctttaacaccggaacaccagcacatatggcgtggtcaattctcgctctgggcttcttctccagcgcgatctataccaccatcatcaccctgggttcacagcagaccaaagtaccgtcgccaaaactggttaactttgtcctgacctgcggaaccatcggtactatgttgacctttgtggttaccggcccgatcgttgaacatagcggtccgcaggcggcactgcttacagcaaacggtctgtacgctgtcgtctttgtgatgtgcttcctgttaggtttcgtcagccgtcaccgtcagcataacaccctgacctctcattaattgctcatgccggacggcactatcgtcgtccggccttttcctctcttcccccgctacgtgcatctatttctataaacccgctcattttgtctattttttgcacaaacatgaaatatcagacaattccgtgacttaagaaaatttatacaaatcagcaatatacccattaaggagtatataaaggtgaatttgatttacatcaataagcggggttgctgaatcgttaaggtaggcggtaatagaaaagaaatcgaggcaaaaatgagcaaagtcagactcgcaattatcggtaacggtatggtcggccatcgctttatcgaagatcttcttgataaatctgatgcggccaactttgatattaccgttttctgtgaagaaccgcgcatcgcttatgaccgcgtacacctctcgtcttacttctctcaccacaccgccgaagagctgtcgctggtgcgcgaaggcttctacgagaaacacggcatcaaagttctggtcggcgaacgcgctatcaccatcaaccgtcaggagaaggtgattcactccagcgccggacgtaccgttttttatgacaagctgatcatggcaaccggttcctacccgtggatcccgccaatcaaaggttctgatactcaggactgctttgtctatcgcactattgaagacctcaacgccattgaatcctgcgcccgtcgcagcaaacgcggtgccgttgttggtggcggcctgttaggtctggaagccgcaggcgcgctgaaaaacttaggtattgaaacccacgttatcgaatttgcccctatgctgatggcagaacagcttgatcagatgggcggcgagcagctgcgtcgcaaaatcgaaagtatgggcgtgcgcgttcacaccagcaaaaacacccttgagattgtgcaggaaggtgttgaagcgcgtaaaaccatgcgttttgccgacggcagcgaactggaagtcgactttatcgtcttctctaccggtatccgtccgcgcgataagctggcaacccagtgtggtctggacgttgctccgcgtgggggtattgtcattaatgattcctgccagacttccgatccggatatctacgccatcggtgaatgcgcaagctggaacaaccgtgtatttggtctggtagcacctggctacaaaatggcgcaggtcgccgttgaccatattctcggtagcgaaaacgcctttgaaggtgctgaccttagcgccaagctgaaactgctgggcgtagacgtaggcggtattggtgatgcgcacggtcgcacgcctggcgcacgtagctacgtttacctcgacgaaagtaaagagatctacaaacgcctgattgtcagcgaagacaacaaaaccctgctcggtgcggtactggtgggcgataccagcgactacggtaacctgctgcaactggtgctgaacgctatcgaactgccggaaaacccggattccctgatcctgccagcacactcgggtagcggcaagccgtctatcggtgttgataaactgccggacagcgcgcaaatctgctcctgcttcgacgtcaccaaaggtgatctgattgctgccatcaacaaaggctgccacacagttgcggcgctgaaagctgaaaccaaagcgggtactggctgcggtggctgtatcccgctggtcactcaggtactgaacgcggaactggcgaaacagggcatcgaagttaacaacaacctgtgcgaacactttgcttattcgcgtcaggaactgttccatttgatccgcgttgaaggcattaaaaccttcgaagaactgctggcgaaacacggcaaaggctacggttgtgaagtttgtaaaccaaccgtcggttcgctgctggcctcctgctggaacgaatacattctgaagccggaacatactccgctgcaggattctaacgacaacttcctcgctaacatccagaaagacggcacctactcggtgatcccgcgttctccgggcggtgaaatcaccccggaagggctgatggcggtaggtcgtatcgcgcgtgaatttaatctctacaccaagatcactggctcccagcgtctggcgatgtttggcgcacagaaagacgatctgccggagatctggcgtcagctgattgaagccggcttcgaaaccggtcatgcctatgcgaaagcactgcgtatggcgaaaacctgcgtgggtagcacctggtgccgctacggcgttggcgacagcgtcggcctcggcgtggaactggaaaaccgctacaaaggcatccgtacgccgcacaaaatgaagttcggtgtctccggctgtacccgtgaatgttcagaagctcagggtaaagacgtgggtattatcgccactgaaaaaggctggaacctgtatgtttgcggtaacggcggcatgaaaccgcgtcatgcggatctgctggcggcggatatcgatcgcgaaacgctgatcaaatatctcgaccgcttcatgatgttctacatccgtactgccgacaaactgacgcgtaccgcaccgtggttagaaaacctcgaaggcggcatcgattacctgaaagcagtgatcattgacgacaaactggggctgaacgcacatctggaagaagagatggcgcgcctgcgtgaagcggtactgtgtgagtggactgaaacggtcaatacgccgtctgcgcagactcgcttcaaacacttcatcaacagcgacaagcgtgacccgaacgtgcagatggtgccagagcgcgaacagcaccgtccggcaacgccgtatgaacgtatcccagtaactctggtggaggacaacgcatgagccagtggaaagacatctgcaaaatcgatgacatcctgcctgaaaccggcgtctgcgcgctgttaggtgacgagcaggtcgcgattttccgcccgtatcacagcgatcaggtgtttgcgatcagcaacatcgacccgttcttcgagtccagcgtgctgtcacgcggactgattgcggaacaccagggcgagctgtgggtcgccagcccgctgaaaaaacagcgttttcgcttaagcgacggcttgtgcatggaagacgaacagttttccgtcaaacattacgaagcgcgagtgaaagacggcgtggtgcagctgcgcggttaatgttttaacgggaggcgcaatgcctcccctttttgcatggtcctgtaataatcttcggtatattgcaggacattttttaaactttttgttttattttttgtttttattttttaaaggataatcaaatgtttacagacactattaataagtgtgcggctaacgctgcgcgcattgcacgcctgtcggcaaataacccgctcggcttttgggtcagctccgccatggcgggcgcgtatgtgggtcttgggatcatcctgattttcacgctcggtaatttgctcgatccatccgtacgccctttggtgatgggcgcgacctttggtatcgccttaacgctggtgattatcgccggttctgaactgttcaccggacacaccatgttcctcacctttggggtaaaagcgggcagcatcagccacgggcaaatgtgggcaatcctgccgcaaacctggctgggtaacctggtcggttccgtcttcgttgccatgctctatagctggggcggcggtagcctgctgccggtagataccagcatcgttcactccgtcgcgctggctaaaaccactgcaccggcaatggtactcttcttcaaaggtgcattgtgtaactggctggtttgcctggcaatctggatggcgctgcgcactgaaggggcggcgaaatttatcgctatctggtggtgtctgctggcatttatcgcgtccggctacgagcactctatcgctaacatgacgctgttcgcgctctcctggttcggcaaccacagcgaagcctacacgctggcgggtattggtcataacctgctgtgggtgacgctgggtaatactttatcaggtgccgtattcatgggattgggttattggtatgctacgccgaaagcgaatcgtccggttgcggacaaatttaatcaaactgaaacggctgccggttaattactaaggggtttttacgtggatcatttgcctatattttgccaattacgcgatcgcgactgtctgattgtcggcggtggtgatgtcgcggaacgcaaagcaaggttgctgttagacgcaggcgctcgcttaacggtgaatgcattagcgtttattccacagttcaccgcatgggcagatgcaggcatgttaaccctcgtcgaagggccatttgatgaaagccttctcgacacctgctggctggcgattgcagcgacggatgatgacgcgcttaaccagcgcgtcagcgaagccgctgaagctcgtcgcatcttctgtaacgtggtcgatgcgccgaaagccgccagctttattatgccgtcgattattgaccgctcaccgctcatggtagcggtctcctctggcggcacctctccggttctggcacgcctgttgcgcgaaaaacttgaatcactgctgccgttacatctgggccaggtagcgaaatacgccgggcaattacgcgggcgagtgaaacaacagttcgccacgatgggtgagcgtcgccgtttctgggagaaattgttcgttaacgaccgcctggcgcagtcgctggcaaacaacgatcagaaagccattactgaaacgaccgaacagttaatcaacgaaccgctcgaccatcgcggtgaagtggtgctggttggtgcaggtccgggcgatgccgggctgctgacactgaaaggactgcaacaaattcagcaggcagatgtggtggtctacgaccgtctggtttctgacgatattatgaatctggtacgccgcgatgcggaccgtgttttcgtcggcaaacgcgcgggataccactgcgtaccccaggaagagattaaccagatcctgctgcgggaagcgcaaaaaggcaaacgcgtggtgcggctgaaaggtggcgatccgtttatttttggccgtggtggcgaagagctggaaacactgtgcaacgcgggtattccgttctcggtggttccgggtattaccgcagcttctggttgctctgcctattcgggtattccactcacgcatcgcgattatgcccagagcgtacgcttaattaccggacacttaaaaaccggtggcgagctggactgggaaaacctggcggcagaaaaacagacgctggtgttctatatggggttgaatcaggccgcgactattcagcaaaagctgattgaacacggaatgccaggcgaaatgccggtggcaattgtcgaaaacggtacggcagtcacgcagcgcgtgattgacggtacgctcacacagctgggagaactggcgcagcaaatgaacagtccatcgctaattattattggtcgggttgttggcctgcgcgataaactgaactggttctccaaccattaatttaacccgggccagagaattctggccttcttaatgactctttttatatattcagcaaataaaacatagccccttaataaatattatctgctaatgggttatattcaccgttacagcgacttacaaaattaagtcattcgctcactgacgccaattaaatattcctgtatcgttcttaacgagcagtctgcttatattcatataatcaatgaatattaattaatatataatacatagggaatgtaaatgaacaaatttattaaagttgcactggtaggtgcagtactggctacgttaactgcatgtactggtcatattgaaaaccgtgataagaactgctcttacgactacctgctgcacccggcaatttctatttctaaaatcattggcggttgcggtcctactgcacagtaagtctctgacagaaatcggctaacaccggtttaattgcccgacgccctctggattttccgagggcgtatttgtttctatgtccttcttgcccccgcccgtaaaaatattttcactttaaattcaatttgataactacatccattagccacagcgcgatcctgtgcgaaattttgtgatcttcctccacattacataacatcatatgttgttatattcatcatgcattgtcatgttaccttttaaatgactgcaaactctcccctacaacgtattggacaagaaaaaggtatcgctatgggaagccaggaactccaacgcaagctcggattttgggccgttcttgcaatcgccgtcgggacaaccgtcggctccggtatttttgtatctgtgggtgaagtggcaaaagcagcgggcacgccgtggcttacggtgctcgcgtttgtcattggcgggttaattgtgatcccgcaaatgtgcgtctatgcggaactatccaccgcttatccggaaaatggcgcagattatgtttatctgaaaaatgccggaagccgaccgctggctttcctctccggctgggccagcttctgggccaacgatgcgccgtcattgtcgattatggcgctggcgattgtcagcaatcttggctttttaacgcctatcgatccgttgctcggtaaatttatcgccgccggattaattatcgcctttatgttgctacacctgcgctccgttgaaggcggcgcagcgtttcagacgctaattaccatcgccaaaattatcccgttcactatcgtcattggccttgggatcttctggtttaaagcggagaattttgccgcccctaccaccactgcgattggcgcaacgggcagctttatggcgctgctggcggggatctctgccaccagttggtcgtataccggcatggcctctatctgttatatgaccggcgaaattaaaaaccccggaaaaaccatgccacgagcgctgattggttcctgtctgctggttctggtgctctacaccctgctggcgctggtgatttccggcctgatgcccttcgacaaactcgccaattctgaaacgccgatttccgacgccctgacctggatccccgcactcggcagcaccgctgggatctttgttgccatcacggcgatgatcgtcattcttggttcgctttccagctgcgtgatgtaccagccgcggctggaatacgcgatggcgaaagacaacctgttctttaaatgcttcggccatgtgcatccgaaatacaacacgccggatgtctccatcatcctgcaaggggcgctggggatcttcttcatcttcgtttccgatctcaccagcctgctgggttatttcaccctggtgatgtgtttcaaaaataccctcaccttcggctccatcatctggtgtcgtaaacgcgacgattacaaaccgctgtggcgtactccggctttcgggctgatgaccaccctcgccattgcgtcaagcctcattctggtcgcctcaacctttgtctgggcaccgattcccggccttatctgcgccgtcatcgttattgctactggtctgcctgcttacgccttctgggcgaagcgtagccgccagctcaacgctttgtcgtaatgttatctggagaaaataaaatgttggatattgataaaagcaccgtggactttctggtcaccgaaaatatggttcaggaagtggaaaaagttctcagccatgacgttccgctggtgcacgccatcgtggaagagatggtgaagcgcgacattgatcgtatttatttcgttgcctgcggatcgccactcaacgcggcgcaaacggcgaaacatctggcggatcgcttttccgatcttcaggtctacgccatttccggctgggagttctgcgataacaccccgtatcgcctcgacgatcgttgcgcagtaattggcgtttctgactacggtaaaaccgaagaggtaatcaaagcgctggagctgggccgggcctgcggcgcactcactgcggcgttcaccaaacgcgcggatagcccgattacctcggcggcggaatttagcattgattatcaggccgactgtatctgggaaattcacctgctgctctgctacagcgtggtgctggagatgatcacccgcctcgcgccgaacgcggaaatcggcaagatcaaaaacgatctcaagcagttgccgaatgcgctcggtcatctggtacgcacctgggaagaaaaaggccgccagcttggtgaactggccagccagtggccgatgatttataccgttgctgcgggtccgctgcgtccgctgggttacaaagaaggcattgtaacgctgatggaatttacctggacgcacggctgcgtgattgagagcggagagttccgccatggcccgctggagattgtcgaaccgggcgttccgttcctgttcctgctcggcaatgatgaaagtcgccacaccaccgaacgcgccattaactttgttaaacagcgtactgacaacgtgatcgtcatcgattacgccgaaatttcgcaagggctgcacccgtggctggcaccgttcctgatgttcgtgccaatggagtggctctgctactacctgtctatttacaaagatcacaacccggatgaacgccgctattacggtggtctggtggaatattaatccctctcccggcccggcaacgggccggatttacgcaaggagttacccgatgaaaacaggtatgtttacctgcggccaccagcggctgcctattgaacacgcatttcgtgatgcaagcgagctgggttacgacggcatcgaaatttggggcggtcgcccgcacgcgttcgcgccggacttaaaagcgggcggcatcaaacaaatcaaggcgctggcgcagacgtatcagatgccgattatcggctatacgccagaaaccaacggctatccgtataacatgatgctgggcgatgaacatatgcgtcgcgaaagcctcgacatgatcaagctggcgatggatatggcaaaagagatgaacgcgggttatacgctgatttccgcggcccacgcgggctatctcacgccacctaatgttatctggggacggctggcagagaacctaagcgaactgtgtgagtacgcggaaaacatcggcatggatctaatcctcgaaccgttaacgccgtatgaatcgaacgtcgtgtgtaatgctaatgatgtgcttcatgcgctggcgctggtgccttcgccgcgcctgttcagcatggtcgacatttgcgcgccgtatgtccaggcggaaccggtgatgagttatttcgacaaactgggcgataaattacgtcatctgcatattgtcgacagcgacggggccagcgacacgcattacattcctggagaaggcaaaatgccgctgcgggaactgatgcgcgatattattgagcggggctatgagggttactgtacggtggagctggtgacgatgtatatgaacgagcccagactctatgcccgccaggcgctggaacgctttcgcgcgctgctgccggaggatgagagatgaaaaccctggcgacaatcggcgataactgcgtcgatatctacccgcaactgaataaagcgttttctggcggtaatgcggtcaatgtggcggtgtactgcactcgctacggcatacagccgggatgcattacctgggtgggtgacgatgactacggcacaaagctgaagcaggatctcgcccgcatgggcgtcgatatcagccatgtccatacgaaacacggcgttaccgcacaaactcaggtggaactgcacgacaatgatcgcgtttttggcgactacaccgaaggcgtgatggccgactttgccctgagtgaagaggattacgcctggctggcgcagtatgacattgtgcacgcggcaatctggggacatgcggaagacgcattcccacagctgcacgctgcgggcaaacttaccgctttcgacttctccgacaagtgggacagcccgctctggcagacactggtgccgcatctcgattttgcctttgcctccgcaccgcaagaagacgaaacgctgcgtctgaagatgaaagcgattgttgcccgtggcgcaggaacagtgattgtcacgctgggtgaaaacggcagcattgcctgggatggcgcgcagttctggcgtcaggctcctgaaccggtgacggttatcgacaccatgggtgccggagattcgttcattgccggattcctttgcggctggtctgcggggatgacattaccgcaggcgatagcgcagggaacggcgtgcgcggcgaaaaccattcagtaccacggtgcctggtaggtataacgttggcgtgagcatcttcacgccaacgtgctgttacttgccggaaaacgaccctataatccgagtaattcattctttatttcagggtcgattatgtcagctacggaccgctactctcatcaactcctctacgctaccgtccgccagcgactgctggatgatatcgcgcagggggtttaccaggccgggcaacagatccctaccgaaaacgagctttgtacacaatataacgtcagccgcattaccattcgcaaagccatcagcgacttagtggcagacggcgtactgatccgctggcagggaaaaggcacctttgtacaaagccagaaagttgaaaacgccctgcttactgtcagtggttttaccgattttggcgtctcacaaggcaaggcgacgaaagagaaagtgatcgaacaggaacgggtcagcgccgcgccgttttgcgaaaagctgaacatccccggaaacagcgaagtgttccatctctgccgggtgatgtatctcgataaagagccgctgtttattgatagttcatggatcccgctgtcgcgttatcctgactttgatgagatttacgtcgaaggaagctccacctatcagttatttcaggagcgttttgacacgcgagtggtcagcgacaaaaagaccatcgatatctttgccgccacccgcccgcaggcaaaatggctgaaatgcgaactgggcgaaccgttgtttcgcatcagcaaaatcgcctttgatcagaatgacaaaccggtgcacgtctccgaactcttctgccgcgccaatcgcatcaccttaactattgataataaaagacattaaccgtaggccggataagatgcgccagcatcgcatccggcgatgctggcgcgttgaattttacatcccgtacgttcccctcaccctaaccctctccccaaaggggcgaggggaccgttcagtacggaatttagcttgacggtgctatccagcattaaatactggcaatactctcacgcaaaatccgcagcaccgtctcttcaccgctgcgattcgggttaatgcgaatcgcacaatgttctgattgtggattcgcctggcgaaacgttccggaaaggcgataaaagagcggcgggatttcatatttcgactctgcacccaccgggtaaggcaaggcaccgcgcttttgcgcctcttccagcactctggcggcaatcggctgatgaaactcgacaatcaacaccttcgactgcgcattagcaatcaccgcgcttttcacttccggcaccgcaccaccgttaagcaaagccagcaaccgttcagatacccctgcctgcaccgcgtgcatcactggcgcaaacaccagaccacgcaatacttccagcgcctgtgcgccctggatctggctaccgccggagtaaagcgtggcgcgaatacggttgataacatcagcatcgccgaccactgcaccaacaccctctggcccaaatagcttgaagcaggaaaatgtcgagacattcgcgccgcattcacagccgattcgagccaccttcatcaccgcatagttgtcatcggttaacgctggaacacctgccgcgcgcaacgttgccagcacatctgccagcacgtagctgtcctgcggctgctggcgcgtatgctgcaccagcgccgcatccggttgttgctcgtcgacgacctgcttcagtgccgacaggtcattgaaatcaacagtaataagcgtcagccccatctgctcaataataacccgtgtcgtcgggtaaacaggcgcgtcatgcaccagaagacgctgccccggtttgagcaaagccgccagcccggcgcgaatcgcgccagtccccgcgccctgcaccagcgccgcagcctgtgcgtgaaatgcatcagccagcacctgttccacacgctgggtaacgcgcggttgattcagtcctggcgttaagcctaaatcaccgccagtaagaaactcgctgccggggaaatggcgacaaatgctatccaccagcgcaaactgcttttgctgcgcctcaataatcgtcaggctttgcagaggaaacgtcttcataggtgccttccttaagccggaacgaacaggccaagccagtaaagaacattcagcagaataccggtgatcattactgccacgaccggtgccgccattttctgtaccggacggcccagggattcgttgaggaagtaaatggcaaccgcgatagagaatccggtataacccgccatcttaattgctgcgaaaatcgaaccgaccagcagcgccacttccatcagcatattcatggcgttacggatgttatccgacgcattacgcaccgacgggtagcgtcccagccatttgccgatcgaacgaagcagcaagacttccgccgaaataaccactgcgcctaataccgctgcaaccatcggattcggcgagagatagtccaccgcataaacaaaggtaaagcccgcaactgcatacacacccgttgctaacgcggtggtggcaatcaacggcacaaaccccagtccgcgcataaattctgccagagccgcctgattaatcagcgtttgcgattgttccggcgttacgcctgcggaatatgctttctccagtgtgaagatcgacacttcactgccagcaaaaatcttcatgctggcaacggcggcaatcaatgctcccacgatggcgatatagggtaagtttttgataatccgtgacgtgcgttcttcaaacaccgaaagcccgctggcatcaatgtcattttcatcacgatgacgcaggtcgtgagttatcgcgatccccagcagcatcaccatgccaataaagatttcgatggattcagggttaagatgtgggaaatagcgcacgactaccacacgggtcatcagtaccaccacggcggcgatcagactttgcttccagccaaactggtagaaaatcgccaccagcgggaacagtgcaaaagctgaaaccaccggcgagcttaattcccccaggctacctaatacatccaccggcagcgcggtcagcagctggtttactggcaacaggcaagtaaggatcaacacgccccagatagcgccaagaccaaacgccatcaggctgtttatcgccaggacgccgaggatatcggtaggaagaaagagtaaccatgcgttgagcagcccggttttcagggtaaaagagatccccaccgaggccacaaaaccaatgctcagaccaaaagcgatactccccgcctcgcgacggttcatatagccttcaatcagttgcggcaggatcgggcggatgccgtcatgaaaaacagccgccgagcgatgcgccagaagcgatgtcatacccgtcaggcacgccaccacgataatctgaatatacagatccatagtcgtgccttttatttcagatggttaatcagcatcggaatcgcgtgttcgacgtgctcaacggaaaggccaaacgccacttttccttcagcgatcattttggcgatatgctcgtctttcgctttaatgcctggtttggcaatggtgcaacttttgttatagcctatcaccgcgatggcaatcgacaatgccgcgcccgcaccggtattacacgcgccgatgtaataatccagttgcccggatttcaccttcattgccgcttccatgtcgttgtgaatgaaaacttcaaaacagccaggagccgtcgcttcaatagtttttttaatctgctcacgctgtaagcctgcaacgccaatctttttcatgagtctgtccttattggaaaaattgagagggattttcacgtaacatcacatccacatcggcctgactgaatcctgactggcgcaattgcggaataaaggtggttagtaaatagtcatagccataaccaccgttggcttttaaatgggagcggcgcgtaatatccatcgacagcatgacgcggttcagcaacccacggtcgcgtagcgcatgaagcatcgcaatacgcttttcgtccgggtagtaactgttcttgccgatggtgtcgaactgcacgtacgcgccgagatcgatcatcttcaaaatgttgtcgaggttgtctttcagatcgcagtgaccaacggtgacgcgcgaaagatcaaccccgtgggcttgtagcaacgccagttgctccagccccatcgtgctgaacgacgtatgcgtggagatcgggcgtccggtctggttatgcgccagcgcagcggcaataaataccttctcttccagcggcgtaatctttccttcgctggtgccgatctccgcgatgatcccggctttcagctccgtgccatcgataccctgttcaatttcatcgaccatctcctgcgccagttcctgcacgctgcgggtcgccacatgttccgggaaaaacgcgtcctggtaataaccggtacaggccaccacgttgatccccgtctcgcgcattacatcaagcataaattgcgcattgcgccccatgtaacggttggtcatctcaatcacattacgcacgccccgggtcatcaggtcgttcatctcctggcaaatgaacgcatactgatcaaggcggcagtccacgttgtttttaaagccggagagatcaatatgcagatgctcatgggcgagggtgtaacccgtcggatcaaaactcatagggtgtctcctgcaaaccggagggaggaaagaaaagagcgaccattttgtggcggtggcgcgcggaaaaattcacacacggtagcccccacatcagaaagcgtggtgcgcacaccgagctgcgtagcgatcatcccttgctgataaaccagcactggcaccacttcgcgggtatggtggctgtgaccaatggtcggatcgttgccgtgatccgccatcacgaccaggcaatcatctggctgcatcgcctcaacaagccgggcaaggttacggtcaacgacctgcaaacgttcggcataacgtgcgacgtcttctgcatgaccagcgaggtcggtttcctgaatgttggtgcaaataaacgccgtcggatgggtgttaaattcgttgagggtgatatccataatccgctggctatccaccagattttgccagctcacgccataaggattgttgacgatatctgccaccttacccaccagcacggttggcacgcctgcttcatacagtttttgtggcacctgcactttttcatcgacgccatagcccatatgcacgacctggaaaccgttgtcataagcgccagaacgcggcgcattgataccaataaagcgcccttctttgctttctgcggcatcgagaatgcgttgactgtcggttaacaggccaccaaatgtaatgacccgaccgacctgtacctgctcacgcacgatacgaccaattttgattgcgtcgtcaaaagagatcacagagagattggcggtaatgttatagacctggcctaaatccgcctcgagattatcgccaatcgcaaccgcctgattgacccacagaaattgcagatcatcgccacggcgctccacctgccagccagcggaaactaatgcctgctcaacacggtcaatcacatcgcgaaaaggcatccgcagcggcggtaacgggcgcgtgcctaaaatttcctgatgccccataaaggtatcgccaccttcatgttgcagctctgccacgccccaggttgcggaatctgacggctgcatatcgcctggcgcataacccaatgcgttgattagccccagcgtctccagcgttggtagctgcaaatgcggcaactggctcaggatgtgaccacatgtattcgctcccgcatcttgcggacgcaccagcgtgacatctttcattgcccctacgccaaagctatcaatcactaacaccacaaatcgcgccattacgcccccagagagtttccaagactgtcataacgaccgacgatttccggttcgccacgatgaataccggacaccagcaccacatcgctacgggtgacaaaaatctgcgtgcgaaaacagagcaccactgcactgcttaccggaaactcgcctgccagcggcagggtgtagtcgatactgctgtcatccacagttttgagattggtttcagtaatcttttgattttctggcgtaaacaccaacgcatgttgcgcatgaccacgacgatagtaaccgccgccgtagcagtagctgtcgccacggaaatgatgggagatttcacttaaccagagcatcgcgatacgttcaggctgatcgccctgctggtttgccggaatagtgcccgtcagcgcatgaccgggttcggcatgagtcacaccgtattgcgccagtaatggcagcgaagtgcagctggtcgctgaaggcgcgttcagttgctcaagtgcaataccagatttcgccagttgatcccgtgcctgtatcagcgtgtgaagattcggtgtcggcaaaacttttccgacagcctcatcccaaagcaggcaagggaaatgggtaagtccggctaaatgcagccctggcagattctggatttcggcgacaatctccggcaacaccttgagggcaaaaccgctctcctggcccggataaagaaaatcatcgtcgctataaactttaagcagcacagactggattcgcccggccttcaccgccgccgcagaaacttcccgcgctttgtcgagagtaaacacggtgatgacgtcggtgccctgttcaacggcgtcagcaacctgatgacaagggatttgtaccagatgcccctgatgcgccacaggcaaaccagcgcggcgcatgactcgcgcctctttgtaatccaccgccacaatgccgctgtagcctaatgccagcaatttttccgccagccacggattacgaccaaactgcttggtcatcagatacagttcaatgccgtaaagccgcgccgtctcaatcagccgcttaccgttttccagtatctgatccacgtcgatcacccagctgtccggggcgatcttgccctgctgccacaggcttagtgcggcggaaatcagcgccgggttctggcgtttcaatgcttctacaaacatcttgttgcctcgtttctgttccttgaattaaatattcatttttttgaatatttaggttgtgcgacgtggatttgtcgggagcttcaaacctcttcgttagcagccatccataatccataaaggttggccagcaaatagccttcttcacacgggttaacttccagtgcgaattccttcaacaacacctgatgcaattgcacaacggcttgccagtggctggattgcgccagttctgccagcaactcgttatccagcggctctatttcttcaccacggcgactgcgcatcagtgcactcgccatatgtgtcatcgccatcgttccttgctcactgcgcaccggcagatggcactctgtttccagtacgttgacgacctgcatcatgcctttgcagatgtccttatcaataacgcctgcctcgcaaagcaggttgagtctggtttccatatcagatgcctttcgtttaataactcggttcctgttccccactcactacccgttgttgatgggcgagcagggcgtgtttatctacaacggcacgcagcagttgttgcattgggtaatcatcgactcgcgtcaggaccacggcttcggtggcctgtaaaaatcgcggatcgtctgtgagcggcgtcgcctctaatcccagcatggtcagttcgttttccgccaccacgttccagatcaccgcatcgacatcgcctttaacaatgcgttgtaaactctcgtgataagagagatcgactcgttccacatcactaccgccaaaaaaaacatcggtcatgattttctgatccgccgaacggttatccagccccacgcgcttcacgtttgcggactcgcctttacggcaaatcaactggtgctcgccaacgtaggtgtgcggccccaactccagcgcgaggcataagcctttttgcgtgagataactttccgccgctagtcgcgaaaccaccgccatgtcatacacgccattaagcagacactccacgcgaatatccgcgccacgcatgtgcgcatagtaaaaaggaatgccatcaaactgggctttcaatccgctcgccaggccttcgtacaaacgggtatagggcaagggcattgcacataccacgttgttgatatccacatgagtcagcaatgctttgttatccatctcgaccagataactgccattgcgcccacggcgttcaatccgtatcgctccgcttgattccagcgttttcaacgcggcctgcgtcaggccaacggatgaacggcattcatttgccagctcatctatggttttcaatcgattaccgcacttttcacccaacaaataacgggccagcgtcgtgatgacgacgccttcttttttgataaacgttcgacgcataataaattttcagtaaattgaatatttatatcttcaggaatttgaagataaggcgcaacagcgagatgtggaaacggcgaggcacttcacattttttcggattattgcaaatgaggataaaaaaaccgggtttccccggtttcagagtgatgataaaagcaaaattgcctgatgcgctacgcttatcaggcctacatttccttgcaatatgtgcattactttgtaggccggataaggcgttcacgccgcatccggcatgaacaaagcgcaatttgccagcaatagtgaattacggcttcgccacaaaaccaatcgcttcgtacaccgcttttagcgtacgggaagcgtgcgcgctggctttttccgcgccatctttcatcacctgttgcaggaaggcttcatcgttgcggaaacggtgatagcgttcctgcaattcagtcagcataccggaaacggcatcagccacttcacctttcagatgaccatacatcttgccttcgaactgtttttccagttctgggatgctctggcccgttaccgctgaaaggatatccaacaggttggaaacgcccgctttgttctgcacatcgtagcgaactaccggcggctcgtcggagtcagtgaccgcacgtttgattttcttcactaccgatttcggatcttccagcaggccgataacgttattgcgattatcgtcagacttggacatcttcttggtcggctccagcagcgacattacgcgcgcgccagatttcggaataaacggctccggcaccttaaagatctcgccatacagcgcgttgaaacgctgggcaatatcgcggctcagttcgaggtgctgtttctggtcttcacccaccggtaccagattagtttgatacagcaggatgtccgctgccatcagcaccggatagtcaaacagaccagcgttgatgttctcggcataacgcgcagatttatctttaaactgcgtcatgcgactcagttcgccgaagtaggtatagcagttcagtgcccagcctaactgtgcatgttccggcacgtgggactgaacaaaaatggtgcttttctcaggatcgataccacaagccagatacaaggccagcgtatccagcgtcgctttacgcagcttctgtgcatcctggcgcacggtgatcgcgtgttggtcaacgatacagtaaatgcaatggtagtcatcctgcatgtttacccactgacgcagcgcacccatgtagttaccaatggtcaattcacctgagggctgtgcgccactaaaaacgatgggcttagtcatttttcgattcctgattttcgctatgcggaagccctaatgcgggcagaaggtcatttatagactgataaattacatcaggctggctgagatcgatagcctcgccgtagttatatccgtaggttaagccaactgatgggcaacctgccgcttttgccgcctgaatatcattgcgtgagtcgccgacaaacagcatctgttgtggggcaattcccatccgctcagccaccagtaacagcgggtccggatgcggttttttgttttgcacatcatcaccaccaatcaccacgctgaagtatttggcgatatctaaggcttcgagcagcggcgcgacgaacggcgtcggtttgttggtgaccaggcctagcggcaggcctttagcctgcaacgcgcccaacgtatcggcaacgtgcgggaacaaaaacgtcccctcttcggcaacctcgccatagtagcgatcgaacagtttacgcagaatacgtacctgttcttctgccggaatgtcgtcatcaacgggcggtttacccattgttttacgctgagtcgcacgttcctgacgcgcccaggtcaatgcgcgctccatcagaacatctgcgccgttaccaatccaggtaataacgcgttcttcacctgcgacgggcaactccagcgcatacagcgccatatctaccgcagcagcaagaccaggagcactgtcgaccagcgtaccatcaagatcaaaagcgacgccgcgaatatcttcaaacttattcatgacttacctttgccagttcactgcgcatttcatcaatgacttttttgtagtctggctggtcgaagattgccgaaccggcgacgaacatatccgcgcccgccgcagcgatttcgccaatgttgttcaccttcacgccaccgtccacttctagtcgaatgtcaaagccagactcgtcgatacggcgacgtacttcgcgcagtttatccagtgtttgaggaatgaaagactgaccgccgaaaccagggttgacggacatcagcaggatcacatccagcttatccatcacgtaatccagatagctcagaggtgtcgccgggttaaataccagacccgctttacagccattttctttaatcagttgcagcgtgcggtcaacatgctcggaggcttctggatgaaaggtaatgatgctggcaccagcggcagcgaaatcaggcacaatgcgatcgacgggtttcaccatcaggtgtacgtcgataggggcggtaatgccatagttacgcaaggatttcagcaccattggcccaatcgtcagattgggaacatagtggttatccatgacgtcaaaatgcacgacatcagcgccagctgccagggcttttgcggtatcttcacccaggcgggcaaaatcagccgacagaattgagggggcaatcaaatactgtttcatccgcttctccttgagaattattttttcgcgggtgaaacgactcctggtttgtacaaagccagcagttcgtccacctttttacgtgtgccgccgttgctgcttatactgcgtcgaactttgacgacatgcaattttgcgcgctgataccactcacgcgttaacatcgtatcgtgattggagatcagcactggaatatggcgctcaaccagaccttcggcgatctccgccagatgcgcttgttgttcaagcgtaaaactgtttgtgtgatacgccgtaaagttggcggtcgcagacagcggtgcataaggcggatcgcaatagacgacggatgcatcatctgcgcgcgccatgctatcggcgtaagactcacaatagaaaaaggcattctgcgctttttcagcgaagtgatacaactctgcttccgggaaatagggttttttgtagcggccgaacggcacgttaaactcaccgcgcagattgtaacgacacaggccgttgtaaccgtagcggttcaaatataaaaacagtaccgcccgacggaacggatcctggcttttgttgaactcttcgcggaactgatagtaaacctcggcgcaatttgtttcgggaacaaacagctcgcgtgcggcctgtacgtactcatcagtacgcatcttcacaatgttatagagactgatcaggtcgctattgatatcggcaaggatataacgagaaaagtcggtgttgagaaacaccgacccggcacctacaaaaggctcaaccagacattcgcccttgggcaaatgccgtttaatatcatcaagcaggggatacttgccccctgcccacttcaaaaaagcgcgatttttcttcatgctgactaactaattacaccttctccggctgtggagaaagctccgacagcatccagcgcttcaggcaactcccgcaacgataaaccattgcgggagataaccttgattacttcagatcggcctgtacctgacgcagcggtttcgcccacgggtttttggcctggacatctgctggcaatgtagataccgcttttttcgcctcttctttcgaagcgtacacgccagaaaccaggacataccacggctgaccattacgcgtcgtttcatagacaacgtagtttttcagattctctttcttcgcccaaccgttcaggttgtcgtagttagaggaactgctcagctgcagagtgtaatggctggacggtgccgatttcaacgaaccaacattacctgcggtcttcgccccagcagcgggtgttgctgtggtttgcgccggggatgccgtctgtactggagccgtagtcgccgtctcttttggtgctggcgtagaagtcgcagccggtgccttcgtgctcgccacaggggcagctggttcagtacgcttcggcgtctgtgctaccggcttcggctccgttttcacggttgcttgcggttttttcggttcaatcaccgcctgctgacgagctgggcgcgtagtggacggacgttcagcggtttgcgttttcgccgtgtcacgcgatgcattgccattgcgaacaggcgcaaccgttgcgggttcagtcggcaacgtggaattgaccgccacattgttcagctgttgctgattttgtggctgggtcagcgcattgttcaggtcaccctgcacttcaacacgttgttgaccatccgttgccaccggggtttgcccttgagtcggcgtagaagagatcggtggcagagaaacatcctgctgagtattttccgcagacgtggttcccggcgctggctgcacgccattcgcctgatcggtcgcattgccagcaagatcaatactcttctcgccagacgcggtttgatcgctggaagtggtcgagggggcttttagcgcagaaccgataccgatgatcaacagcagtagaaccagaatgccgacgcccatcatcatatactgacgagaagcgggtttactggctgcttttttgcgcttacgcggacgacgctctacgcgctcttcatccacggtttcatcttcggattcgtcaatttcttcttcgatttccggttcctcattgcgctctttttgcgcacgagtcggacggcgatcgtcagtgtcatcaagttcaatatcatcaaaattgatctgcggttcgccacgttcagtacgctcagaacgttcagaagattgacgagaacgaccagtacgacgatcgctgggatcgggtttcagctcgtcttctggtttgaattcatccatttaacaccccactaaaaggttaatgcttaccacgttgcaattaacctgaagctaatagaccgcttgataagcggcctgacctttcttgttgttacgctgattgacaatcggcaatggcgttaagaacaagctcgtgcgaaacgccgctgcgaacttcactcttaccaattgccaacggaagaattaagcgcatctctcccgcaaggactttcttgtcacgcagcatatgcggtaaatacgcctgcgcggacatttcgcgcggcccattgaccggtaacccagcccgcttgagcagggttataatacgctgcgtttcggcagaactaaactgcccgagacgttccgacgtccgcgccgccatcaccatacccgcagcgaccgcttcaccatgtaaccaattgccataccccatttcagcttcaatggcatgaccaaaggtgtgtcccagattcagtaaagcacgtaacccggtttcgcgctcgtcggcggcgacaacttctgccttcagttcacaacaacggcgaatacagtacgccattgccggaccgtccagacgcaacaacgcatccagattctcttccagccagttaaaaaacgcaccgtcaagaataatgccgtatttgatgacttctgccagccccgacgctaactcacgcgggggaagcgttttcagacagtcgagatccaccaccactgaagcaggttggtagaacgcgccaatcatgtttttaccgaggggatggttgaccgcagttttgccgccaacggaggaatcgacctgcgacagtaacgtcgtcgggacttgaatgaaacggacaccgcgctgataactcgccgccgcgaagccggtcagatcgcccactacgccgccgccaagcgccaccagcgtagtatcgcgaccatgcggtttttgtaacaacgccgtaaagacggtatcgagtacagccaggcttttatactgctcgccgtcagggaggataacgctatcgacgttaacacccgcctgttcaagtacgccgcggaccttatcgagatacagaggagccagggtttcgttggtgaccaacatgacctgctcgcccgatttcagcggtaagaatgaagctggttcattaaacaaaccagatgcgatggtaattgggtaactacgttccccgagagtaacgacaatcctctccataacgcgacatccaccttaattactgtacccgcagacgagtgtatataaagccagaattagttgctttccagcatgtgaataatctggtttgcaaccactttagcgctttgatcatcagtacgaatggtcacgtcggcaatctcttcatacagcggattgcgttcattggccaacgcttccagaacttcacgcggcggtgtttcaacgtgcagcaacgggcgttttttatcacgctgcgtgcgtgcaagttgcttttcgatggtcgtttcaagataaacgacaacgccacgagcggaaagacggttacgcgtttcacgggatttcacagagccgccgccagtagccagcacaataccctgtttctcggtcaactcattgatgaccttttcttcgcgatcgcggaagccttcttcgccttctaaatcgaaaacccagcccacatcagctccggttcgtttctcaatctcttgatcggaatcgtaaaattccatattgagttgttgagctaactggcgcccaatagtgctttttccggcacccataggcccaaccagaaagatattgcgtttctctgccattttttcggtactactaagactattcgttaatgataaacccgcttcgctcagagagcgccgcaggacatgaactgaaacctcataagatattgcgagagtcagactgaaaattatctcaatactccagcgggtttggcaactgaataaatcacccatccctctgcatatctggtcgctgcaagcgcgctgccttgctaccaccgctctggcgataaatcaccgggtaagattagcgtaaaaaagacagcaaaatgccgcctgaatgataaatcatcatcatggaacgcaggcagcgaagagcaccaactctcaaatcggtactccttgtatgctaaatacctgcgcgcgtcaaatagatgaaacacgttcagcgtaaaaacattaccgcttttacggctgtttactcactggaaaccagtcgtggcgtgataaacaccactaactcgcgtcgttcatcttcttttccgtcatgacgaaataattgcccgaaccagggaatgtcgccaagcaacggtacgctatcctgacccgatttatttttacgggtaaaaatgccgcccagcgccaacgtttctccgcttttgacctcgacctgcgtttcgatctcctgcttatcaatcgccagcacttcgccatcggcctgctgtagcacctgccccggaacgttctggctgatgtgtaatttcagccggatgcgacctttttgtaacaccgtgggcgtgacctccatccccaggacggcctctttaaattccaccgacgtcgcgccactttccccgctggaaacctgatatggaatttcgctcccctgtttaatgctggcaggctgaagatgtgaggccagcagacgcggactggcgataatatccagctgctgtttttgttcgagcgcggaaagctcaagatccagcaagcgtccgttgatgcgcccaatgttaaaaccgacatgcgttgtcgccgtcgctacggagaggtcgctaccaagcgtggtgacttgcccaacgccaccagcgtgttgcgcatcggccagcgtccatttcacgcctaactcacgcaaacttttttcattaatggtgacaatatgcgccgacagctcaacctgcccgaccggcagatccatttgcgctacccactgttcaagcgcgcttaacgccgttttgttatctcgtagcaaaaggcgattggtgcgtttatcgacggtcatactccctttggcactcagtagcttctcccccgctttcgccagttctcccgcgtcggcgtattgcagggttatactgcgattttccagcggcagatttgcctgcgcccgcgcctgctccgcctcctggcgggcgatattgttattctgccaggcaatggaatgcactgagagaatgttgccttcctgccgcgttatcagtccggcgcttttcactacagtttgtagtgcctgcttccagggaacatctgttagatgtaacgacaccgtaccgctgacgtctggcgacacgaccaggttcaacttctcctgttcagccagcgcctgcaacacctgagctaccggaacgtcatccaccatcagcgtcactttttgcggctttgccgcctgtacgccgggtatcagcatcaacagtagtgcggctatccattgcttcatttgtatctccttgccgttgccacaaccattgtggcggttcgcagtttgtcccggtacccagcgttagtacgtctggcgtcagctgtaaaattgtccagccgttttccagcacatcgttttgctgcacccgtcgccatttcttttgcccgtcttttattacaccgatgatgcgctcgcctcgccctaccatcccctgatagcgccactggctaagttcgctaatccggcatagatcttccggcggtttaaaagggtcacgcataccggttaaaaggcacaatgcaatacctgccaacaaccagcgtttaaccctcatgcggcgtctccagttgtagcgtgaacaaaagatcatcaccttccacgcttaacgaaaaacggctcacgctgacgttgcgctctgccagccgtgtaaatgccgacggcactgcttcccacagcgttttcaacgccaactcgcctccctgcgcggatggatgccaggaaaccagttgcgcgccggataactgaaaatccagtggcgaaaagggcagcgttttttcctcgctgaagggagcggtgtctaccaggcgatacagtgcggcccactgctggtgatgacttgcccgtagtcgaattaatgcgtcgcgctcttcatggtgtgtcgatgacagaaaaatgagcgtaactaacatcagcaaccagaatgcccagcaaagctggcggaggcggggtgatgtggcgaaccaccagtcaaagaacatgttcatcgctaaccttccttgttaactgatactcaaattgccagcgtccctgcgcatcctgctgcgtggctccccgctgattgagatgaaaagatgcatcctggcggagtgacgtttctagtgcgtttaacgcggtaatgcttgttgtcagccccttgatctccagcgttccctgctgccagcttatcgttgtcagccaggcgtgctcgggtaaaagcgccgccagtgcttccagcgcagattgccagtcgcgggtaaattgtcgctggcgctgccgttgcgaacgctgttcgcgtaactgctgttgctccagcaaacgtggcttcgttatctgtaagctgcgggcgagttgttgttccgcctgaagcaaaactgcgtctatgcgcgcttcggcgctgcctgtcagacgcagtattagcgttatcccgacggccagcagcagaggcgcaacgaacatcagcaaccagaaacgcagaaaagcggtccggcgttgctgtcgccagggcaaaaaattaattggcgggttcatcagtacgccttcccaagcgccagccccagcgcgatggcaaagtctccacctggcggcggtagcggcggctgacgaacagaaacggcctcccagggatcaaatccgccttcgccacatatcgcgacgctttcgggatcaacggataacgctgccgccagctccttcgcgctagtcatccccaccgccagtttgcgcccccagctatagcgcgtcgcccacagccactgttcgttatcacgccaggccagacattgctgatgagaaggtaaaaaaggcaggaatcgctgtaatgcactggcatccggggtgatcgcgctcacatgaacacgcaacctttctgccagagtaagcagcgttgccagctctttgctttgcgcggcagtcacgttataggcgggactgagtgagtcttcgctgtaatcgaagcgcagggagtccggatccatatccagctcgcgggccatcgtccctgacagccaggccgtttgctcccgctcaccaagggacatcgacgggcgcggaaatgaccgctgtaatgtgcgactggcgggaaacgccaacataatgtgatgacgctgcggcagttcgcgactccacggtaacaacgttttagccagctgctgcgcatcaacaatccgcccatctttgataatgtcgttctccagcggcaaccgccaccagcgttgcaaaaagcattcttttgcgccccgcacgatcgcaaccgctaccgcttcttgctgttgtaaatgcaaaccaatttgccagatcttaaatgccattgtgatgatctccttatcacccgtcactctgacgggtatatcaatgcgtctggcttgcctttatactaccgcgcgtttgtttataaactgcccaaatgaaactaaatgggaaatttccagtgaagttcgtaaagtattttttgatccttgcagtctgttgcattctgctgggagcaggctcgatttatggcctataccgctacatcgagccacaactgccggatgtggcgacattaaaagatgttcgcctgcaaattccgatgcagatttacagcgccgatggcgagctgattgctcaatacggtgagaaacgtcgtattccggttacgttggatcaaatcccaccggagatggtgaaagcctttatcgcgacagaagacagccgcttctacgagcatcacggcgttgacccggtggggatcttccgtgcagcaagcgtggcgctgttctccggtcacgcgtcacaaggggcaagtaccattacccagcagctggcgagaaacttcttcctcagtccagaacgcacgctgatgcgtaagattaaggaagtcttcctcgcgattcgcattgaacagctgctgacgaaagacgagatcctcgagctttatctgaacaagatttaccttggttaccgcgcctatggtgtcggtgctgcggcacaagtctatttcggaaaaacggtcgaccaactgacgctgaacgaaatggcggtgatagccgggctgccgaaagcgccttccaccttcaacccgctctactcgatggatcgtgccgtcgcgcggcgtaacgtcgtgctgtcgcggatgctggatgaagggtatatcacccaacaacagttcgatcagacacgcactgaggcgattaacgctaactatcacgcgccggagattgctttctctgcgccgtacctgagcgaaatggtgcgccaggagatgtataaccgttatggcgaaagtgcctatgaagacggttatcgcatttacaccaccatcacccgcaaagtgcagcaggccgcgcagcaggcggtacgtaataacgtgctggactacgacatgcgccacggctatcgcggcccggcaaatgtgctgtggaaagtgggcgagtcggcgtgggataacaacaagattaccgatacgctgaaggcgctgccaacctatggtccgctgctgcctgccgcagtcaccagcgccaatcctcagcaagcgacggcgatgctggcggacgggtcgaccgtcgcattgagtatggaaggcgttcgctgggcgcgtccttaccgttcggatactcagcaaggaccgacgccgcgtaaagtgaccgatgttctgcaaacgggtcagcaaatctgggttcgtcaggttggcgatgcatggtggctggcacaagtgccggaagtgaactcggcgctggtgtcgatcaatccgcaaaacggtgccgttatggcgctggtcggtggctttgatttcaatcagagcaagtttaaccgcgccacccaggcactgcgtcaggtgggttccaacatcaaaccgttcctctacaccgcggcgatggataaaggtctgacgctggcaagtatgttgaacgatgtgccaatttctcgctgggatgcaagtgccggttctgactggcagccgaagaactcaccaccgcagtatgctggtccaattcgcttacgtcaggggctgggtcagtcgaaaaacgtggtgatggtacgcgcaatgcgggcgatgggcgtcgactacgctgcagaatatctgcaacgcttcggcttcccggcacaaaacattgtccacaccgaatcgctggcgctgggttcagcgtccttcaccccaatgcaggtggcgcgcggctacgcggtcatggcgaacggcggcttcctggtggacccgtggtttatcagcaaaattgaaaacgatcagggcggcgtgattttcgaagcgaaaccgaaagtagcctgcccggaatgcgatattccggtgatttacggtgatacgcagaaatcgaacgtgctggaaaataacgatgttgaagatgtcgctatctcccgcgagcagcagaatgtttctgtaccaatgccgcagctggagcaggcaaatcaggcgttagtggcgaagactggcgcgcaggagtacgcaccgcacgtcatcaacactccgctggcattcctgattaagagtgctttgaacaccaatatctttggtgagccaggctggcagggtactggctggcgtgcaggtcgtgatttgcagcgtcgcgatatcggcgggaaaaccgggaccactaacagttcgaaagatgcgtggttctcgggttacggtccgggcgttgtgacctcggtctggattggctttgatgatcaccgtcgtaatctcggtcatacaacggcttccggagcgattaaagatcagatctcaggttacgaaggcggtgccaagagtgcccagcctgcatgggacgcttatatgaaagccgttcttgaaggtgtgccggagcagccgctgacgccgccaccgggtattgtgacggtgaatatcgatcgcagcaccgggcagttagctaatggtggcaacagccgcgaagagtatttcatcgaaggtacgcagccgacacaacaggcagtgcacgaggtgggaacgaccattatcgataatggcgaggcacaggaattgttctgattaaaaaggcgcttcggcgccttttcagtttgctgacaaagtgcacttgtttatgccggatacggcgtgaacgcgttatccggctaacaaaatcgtgaaaactcaataaattgcagaaaccccataagcctgataaacattgtgcatcaggcaaacttcacgcatttacactcgcccctgccctttcaaccattcgcgcacgaggaacagcgcactgacattgcgcgcttcattgaagtcagggtcttccagcaaatccatcatatgcgccagcggccagcgcacctgtggtagcggctctggctcatcgccttccagtgattccgggtagagatcttgcgctaccacgatattcattttgctggaaaagtaagacggtgccatgctgagcttcttcaaaaaagtcagatcgttcgctccaaatccaacctcttcttttagctcgcggttagcggcttcgtagacgctttcacccggatcaattaatcctttcgaaaaacctaattcgtaggattcagttcccactgcgtattcgcggatcaggatcaggtgatcgtccacaatcggcacaatcatcactgcttcccggttggttggacgcattcgttcataaacacgccgcacgccattgctgaactccagatccacgctctcgacggtaaacagtcgggaacgggctacagtttcaacattcagaatggtgggtttttgtaatgatttgctcatcgtgggatctatgctgtgaaatcagcggttattgtgcgatatcggacacgctttcggcaatgtgaattgcatgttatttacatttatgtaacttaataaataatcgtcctcaaatcaaattaaaagtcaataggttgaaataactccaggaatttgctgatattccgccttcagagggtttgctatgatcagcggttactgtgatgtgcttaatgatgctcaagttaaactccacgcttgccgatagccaaccgcagaatcatgtattgtgtccggtgcgactgaccacgcctgacagactaagtaagatggggaaagcatgagcaccattgtgatttttttagctgctttgctggcctgctcactacttgcgggatggctgataaaagtgcgatccagacggcgtcagctgccctggaccaacgccttcgcggatgcgcaaacgcgtaaactcacacctgaagaacgtagcgccgttgaaaattatcttgagagcctgacgcaggtattacaggtgcctggcccaacgggagccagcgcggcaccgatctctctggcgctgaatgccgaaagcaacaacgtcatgatgctgacacacgctatcacgcgttacggcatctctaccgacgatccgaataaatggcgttactacctcgattcggtagaagtccacctgccccctttctgggaacagtacatcaacgatgagaataccgttgaactgattcataccgattcgctgccgctggttatttcactcaacggtcatacgctgcaggagtacatgcaggaaactcgcagctatgccttgcaacctgttccgtcaacgcaggcgtcgattcgcggggaagagagtgagcaaatcgagctactcaatattcgcaaagaaacgcatgaagaatatgcgctgagtcgtccgcgcgggctgcgtgaagcgttgctgatcgtcgcctccttcctgatgttctttttctgcctgattaccccggatgtatttgttccgtggctggcaggcggcgcgttactgctgctgggcgcaggtctgtgggggctattcgcgcccccggcaaaatcctccctgcgggaaattcattgtctgcgcggtacaccccgtcgttggggattgtttggcgaaaacgatcaggaacagatcaacaatatttcactcggtattatcgacctggtctatcccgcacactggcagccatacattgctcaggatctcggtcaacaaaccgatatcgatatctatctcgaccgccatgtagtgcgtcagggacgatatctttcgctgcatgatgaagtaaaaaactttccgttacagcactggctgcgcagtacgattatcgctgcgggctcgctgctggtgctgtttatgctgttattctggatcccgctggatatgccgctgaaattcactctctcatggatgaaaggcgcgcagaccattgaagccaccagcgtaaaacaactggctgacgctggcgtgcgggtaggcgatacattgcgtattagcggtacgggaatgtgtaatattcgaacttccggaacctggagcgcgaaaaccaattcaccttttttaccgtttgactgctcgcagatcatctggaacgacgcccgctcattgccattaccagaatctgaactggtcaacaaagcgacggcattgactgaagcagttaatcgccagctgcaccctaaaccggaagatgaatctcgcgtcagtgcctcattacgttcagcaattcaaaaatccggcatggtattgcttgatgattttggcgacattgtactgaagacagcggatttatgttctgccaaagatgactgtgtgcgactgaaaaatgcgctggtcaatctcggcaacagtaaagactgggacgcgctggtaaaacgcgccaacgccgggaagctcgatggcgtgaatgtgttattacgcccggtgagtgcggaatcgctggataacctggtggcaacctccaccgcgccgtttatcacgcatgaaacggcgcgagcggcacaatcactaaacagtccggcccccggcggattcctgattgtcagcgacgaaggcagcgattttgttgatcagccctggccttcggcatcactttacgactacccgccgcaagaacagtggaacgctttccagaaactggcacaaatgctgatgcatacgccgtttaacgccgagggtatcgtcacaaaaatcttcactgacgccaatggtacgcagcatattggccttcatccgatcccggatcgttccggcctgtggcgctatctcagcaccacattgctgctactgacgatgctgggtagcgccatttacaatggcgtacaggcctggcgtcgttaccagcgtcatcgcactcgcatgatggagattcaggcctattatgaaagctgcctgaacccgcaactgatcaccccttcagaaagccttatcgaataacacgtttgcgcggcaggttatgctaccctgtcgcgcaaattgcttcactctggagatttccctcatgcatatcaacattgcctggcaggacgtagataccgttctgctggatatggacggcacgttgctcgacctcgccttcgataactatttctggcaaaagctggtgcctgaaacatggggcgcgaaaaacggggttacgccacaggaagcgatggaatatatgcgccagcaatatcacgacgtacagcatacgctaaactggtactgtcttgattactggagtgagcaactgggtctggatatctgtgcgatgaccaccgagatgggaccgcgtgccgtactgcgtgaagataccattccgtttcttgaggcactgaaagccagcggtaagcagcgaattttgctcaccaatgcgcatccgcacaacctggcggtaaaacttgagcataccggtctggacgcacaccttgatttattactttccacccacacatttggttatccgaaagaggatcagcggttatggcatgcggtggccgaagctacgggtctgaaagctgaaagaacgctgtttattgatgacagcgaagcgattctcgatgctgccgcgcaatttggtattcgttactgcctcggcgtgactaatcctgattccgggattgccgagaaacagtatcaacgccatccgtcactgaatgactaccgccgcctgatcccctcgctaatgtgaaggagacgccatgaaagagaaacctgctgttgaggttcgactggataaatggctatgggctgcccgtttttataaaacccgcgcgctggcccgtgaaatgattgaaggcggtaaggtgcattacaacgggcagcgcagcaagccgagcaaaatcgtcgagctgaatgccacgctcactctgcgccagggaaatgacgaacgcacggtgattgtaaaggcgattactgaacagcgtcgccccgccagcgaggcagccttgctgtatgaagagactgcggaaagtgtagagaaacgcgaaaaaatggcgctggcacgtaaacttaatgccttaaccatgccgcacccggaccgacgcccggacaaaaaagagcgccgcgacctgttacgatttaaacacggcgacagtgaataactgtcacctgcaagagagatgattatgccgcaacatgaccaattacatcgctatctgtttgaaaactttgccgtgcgcggcgaactggtaaccgtttcggaaaccctgcaacagatccttgagaaccacgattatccgcagcccgttaaaaacgtgctggcagaactgctggttgcgaccagcctgttaaccgctacgctgaagtttgatggtgatatcaccgtacagctgcagggcgacggtccgatgaatctggcggttattaacggtaacaataaccagcagatgcgcggtgtggcgcgcgtgcagggcgaaattccagaaaatgccgacctgaaaacgctggtcggcaatggttacgtggtgatcaccattaccccgagcgaaggcgaacgctatcagggcgtagttggtctggaaggtgataccctggcggcctgcctggaagattactttatgcgttctgaacagctgccgacgcgcctgtttattcgcaccggcgacgtagacggcaaaccggctgcaggcggtatgttgttgcaggtaatgcctgcgcaaaatgcccagcaggacgactttgaccacctggcgacgctaaccgaaaccatcaaaaccgaagaactgctgaccttaccggcaaacgaagtgttgtggcgtttgtatcacgaagaagaggtgacggtttacgatccgcaggatgtggagttcaaatgcacctgctcgcgtgaacgttgcgccgatgcgctgaaaacgctgcctgatgaagaagttgatagcatcctggcggaagatggcgaaattgacatgcattgtgattactgcggtaaccactatctgttcaatgcgatggatattgctgaaatccgcaacaacgcgtctccggcagatccgcaagttcattaatgagtatgtccggcagagagggctctgccggattttacgactaatacacctgatgcgctttgtcactcattcagattcacattcagcctttcaccatccactacaagatcgcgccacgctttaggcttcgtccccagttttccatccttcgcagctgtgagtaatttttctttcgttatttcgttcggaagtaaactcatatcaagcgcgtcccattcttttctgtctgagtcaaagccatagacaatgactctgtcatcattaaaagcaaacaggatccgctccgcctgaccatcactattcagatcttgctcgaccaggacgcaggcgtctttttcaatacaggtcatcacgttatagcgatcctggattaaggccgaccagaatgtcgcatcaggtttaacagaaccaggggcaattaacacattatcggctaatactttttccgatacctgttgctgaagatgttgctctccatctaacgccatcagcagatcccgcgcgcgtttcgggtctttcataaacccggcatcgcttttcagcgactcaagcgcagcacgtccatagcgaccgctctgctcgagcatgtagatagttacctggtctgacgtgtttttgccgctctgataacgcgccatatggctgttcacgctaatgcgcatactgtccagcaccggcgaattaagaagcaccagtatcaccaacaccaataacgaaaccgcaaggttcactttgccctgaagaacaacgggattttgccctttacgccagacgatgctgacaaaataccccagcgaccacaccagtaacaccagcaccgccagcacgccctgcaagcggtcgacagtccagccgtactgagcgacccgcagccataacgcccaggcggcgacgaacacatacagcggagcaaccagcaaagcggttttaatcaggcaacgcaacggccctgtccagggaagtgacgctttttgcggatcgcggacaatagccattaagatcaattgcaaaaaggccagcgtcaacagcaacccggcggcggagatgtggcgagaaatcgcgctcaggcccgtaaacggcagggtgatgataaacatcagggttagcaatgatactaacggcagcaaccccgtggcgattaacgtgaacaacttttgaatagagtcgattaaacgtgactgtgttcgcgcgaggatcaccgccagcgcggtaaccagacctaacgtgagataaataaaccagtcggttgcaaaaaagagcgtattgaaaaacgtgatgccaacaagtttaaacaactcactccacagtaaaagcaccagccacgtcaagccattggcgagaaaaatcaccagtaatataagtacgttatgccatactgactggtaaaaatagcgatagcggctactgtcattgcggatgcgaaggctttgttgtatccacggtagcaacaacattgccatcaacagcagatagcaaccaaaatcccaaagcgccttttcagctctccaggggttcatgccatcagtttgccacttcagccagccgctcatccccagcgtggcaataaacactagcgccagccatccccaaaggcgcttctgtttaaaagagatcacggagaagagtaaaacggatgaaaacgcgacggtcgcaggcacgccataaacaatccaactgtgattttttccggaaagccaggcgatcagcaggtagcaaaccagaccctgaagtaatccggtagcaatcatcccccagcgtgttgcgggtgaaagttcaacgttatccatgttggttatccagaatcaaaaggtgggttaattatcgcatccgggcagtagtattttgcttttttcagaaaataatcaaaaaaagttagcgtggtgaatcgatactttaccggttgaatttgcatcaatttcattcaggaatgcgattccactcacaatattcccgccatataaaccaagatttaaccttttgagaacattttccacacctaaaatgctatttctgcgataatagcaaccgtttcgtgacaggaatcacggagttttttgtcaaatatgaatttctccagatacgtaaatctatgagccttgtcgcggttaacacccccaaaaagactttactattcaggcaatacatattggctaaggagcagtgaaatgcgcgttaacaatggtttgaccccgcaagaactcgaggcttatggtatcagtgacgtacatgatatcgtttacaacccaagctacgacctgctgtatcaggaagagctcgatccgagcctgacaggttatgagcgcggggtgttaactaatctgggtgccgttgccgtcgataccgggatcttcaccggtcgttcaccaaaagataagtatatcgtccgtgacgataccactcgcgatactttctggtgggcagacaaaggcaaaggtaagaacgacaacaaacctctctctccggaaacctggcagcatctgaaaggcctggtgaccaggcagctttccggcaaacgtctgttcgttgtcgacgctttctgtggtgcgaacccggatactcgtctttccgtccgtttcatcaccgaagtggcctggcaggcgcattttgtcaaaaacatgtttattcgcccgagcgatgaagaactggcaggtttcaaaccagactttatcgttatgaacggcgcgaagtgcactaacccgcagtggaaagaacagggtctcaactccgaaaacttcgtggcgtttaacctgaccgagcgcatgcagctgattggcggcacctggtacggcggcgaaatgaagaaagggatgttctcgatgatgaactacctgctgccgctgaaaggtatcgcttctatgcactgctccgccaacgttggtgagaaaggcgatgttgcggtgttcttcggcctttccggcaccggtaaaaccaccctttccaccgacccgaaacgtcgcctgattggcgatgacgaacacggctgggacgatgacggcgtgtttaacttcgaaggcggctgctacgcaaaaactatcaagctgtcgaaagaagcggaacctgaaatctacaacgctatccgtcgtgatgcgttgctggaaaacgtcaccgtgcgtgaagatggcactatcgactttgatgatggttcaaaaaccgagaacacccgcgtttcttatccgatctatcacatcgataacattgttaagccggtttccaaagcgggccacgcgactaaggttatcttcctgactgctgatgctttcggcgtgttgccgccggtttctcgcctgactgccgatcaaacccagtatcacttcctctctggcttcaccgccaaactggccggtactgagcgtggcatcaccgaaccgacgccaaccttctccgcttgcttcggcgcggcattcctgtcgctgcacccgactcagtacgcagaagtgctggtgaaacgtatgcaggcggcgggcgcgcaggcttatctggttaacactggctggaacggcactggcaaacgtatctcgattaaagatacccgcgccattatcgacgccatcctcaacggttcgctggataatgcagaaaccttcactctgccgatgtttaacctggcgatcccaaccgaactgccgggcgtagacacgaagattctcgatccgcgtaacacctacgcttctccggaacagtggcaggaaaaagccgaaaccctggcgaaactgtttatcgacaacttcgataaatacaccgacacccctgcgggtgccgcgctggtagcggctggtccgaaactgtaatgatttgaagctggagaatatctatccagtatcttatagaaagcaaaacgggaggcaccttcgcctcccgtttatttacccttcttttgtcgtgccctgcgcccgcgttaccggcactggcagccaggcgcgaatggaaagcccgccccgctcgctggtgccaagctccagcatcccgttatggttatccacgatacgctgcacaattgccagccctaatcccgtgccgctaatggtgcgcgcactgtcgccgcggacaaacggctggaacaggtgcttacgttgttccggcgcaattcccggaccgtcatcttccacctggaaccaggcgcgattcggctccgttccgctgctgactttgatccagccattgccataacgggcggcgttgaccaccatattcgccaccgcgcgtttgatcgacagcgggtgcattttcacttcaatgctgccggggtaaagcgcggtttcaatttcccgctcatagccactttcggcagcaatcacctcaccgagtactgcattaagatccgccatttccatcggcatctcctgcccggtgcgcaggtagtcgataaactgctcaatgatggcgttgcactcttcgatatctttattgatcgattctgccagatagccatcctgctcgctcatcatctcagtcgccaggcgaatacgcgtcagcggcgtgcgcaagtcgtgacttacccccgccatcagcagcgtgcggtcatccgccagttgcttaacaccagccgccatatggttaaaggcacgggtaacggaacgcacctccgaagcgccatactcacgcagcggcggcggaataatccctttaccaacctgcaaggctgcgtgttcgagatcgaccaacggtcggttctggatacgaataaacagccacgccccgcctatcgccaatagcataatcgccagcgtatagcggaacagcggagagaaatcgccctgatgaatttcggtcagcggcacgcgtacccagatattgggcgacagccaggttttcagccagacgacaggcgaacttttgttgacctcaacgcgcacttccgtcgggccgcccagttgctgcgccatctgatggcttaagaattcatagtgttgcgcccaacgcagacctgcctcttcggcagcctcgttggagtagagagagatccccagctcacggtagatctcccgacggaaagcgggaggcacaaccaactgcgtgccgtcctccagttgcagtttgtcggtcatcaacatacgcacttcgtacgcgaggactttattaaactgctggaggctcggcaaaatcgcgaagttcagcaccaccagataagtcgtcaccaggctggcgaacagcaaggtgacgatgagcaataacgtacgggcaaatgaacttcgtggcgagaagcgcaatcgcctcatgctttagagccgtccggtacaaagacgtagcccagaccccagacggtctgaatgtaacgcggatgcgctggatcttcttccaccatgcggcgcagacgcgaaatctgcacgtcgatggagcgttccattgcggaatattcacgaccacgggcaaggttcatcagcttatcgcgggagagcggctcacgcggatggctgaccagtgccttcagtaccgcaaactcaccgctggtgagcggcatcggctcgtcttcgcggaacatttcgcgcgtaccgaggttaagtttgaacttaccgaaagcaattaccgcctcttcctgtgacggtgcgcctggcagttcgttcgcctgacgacgcagcaccgcacggatacgggccagcagttcacgcgggttaaacggttttggaatgtagtcgtcagcgccaatctccaggcctacgatacggtccacttcttcccctttcgccgtcaccataatgatcggcatcgggttgctctgactacgaagacgtcggcaaatcgacaagccatcttcaccaggtaacattaaatccagtaccataagatggaaagattcacgagtcagcaggcgatccatctgttctgcattagcgacgcttcgaacctggaagccttgttcggtgagataacgttccagcagcgcacgcaggcgcatgtcgtcatcgaccaccagaatcttgtagttctcttgcattgtttgtactcccaaaggttcgcaacaatttgtaagcgtgtattcttaaaaaagctcacgttcgtcaccagctaaatctggtatgaatttcagcctaaattgttacaaagcatattaaacagcagcttaagtatacaatttattcggcgaaacattattgattctgttgatatgatcacgttatacccaatgtgcgcattatcaaacagacaaagggaatcaacgagatgaaaacgcccctggttacccgggaagggtatgaaaaactcaaacaagagcttaattatctctggcgtgaagaacgcccggaggtcacaaaaaaggtgacctgggccgcaagtctgggcgaccgcagcgaaaatgctgactatcagtataataaaaagcgtctgcgtgaaatcgaccgtcgcgtgcgctatctcactaaatgcctggaaaatctcaaaatcgtcgattactcccctcagcaggaaggcaaagtcttttttggcgcgtgggtggagattgaaaacgacgatggcgtgactcaccgtttccgtattgtcggctacgatgaaatttttggccgtaaagattacatctctatcgattccccgatggcccgcgcattgctgaaaaaagaagtcggcgatctggcggtggtgaatacccctgccggggaagcgagctggtatgttaatgctatcgagtacgtgaaaccgtaaggaagagtcttaacctcctgccgatggctggcatttttgccagccagtccgtataactatcccctgatttttgatccgaaaagatgaactcaaaccatgatgaatgattcgttctgccgcattattgcgggtgaaattcaggcgcgcccggaacaggttgacgctgccgttcgcctgcttgacgaagggaataccgtgccgtttatcgcacgttatcgtaaggaaatcaccggcggtctggatgacacgcagctgcgtaatctggaaacgcgtctgagctatctgcgcgagctggaagagagacgtcaggcgatcctcaagtccatttccgagcaaggcaaactcaccgatgatctggcgaaggccatcaacgccaccctaagcaaaaccgaactcgaagacctctacctgccctacaaacctaaacgccgcacccgcgggcaaatcgccattgaagcagggcttgagccgttggctgacctgctgtggagcgatccgtcacacacgccagaagtcgccgctgcacaatatgtttatgccgataaaggcgtggcagataccaaagccgcgctggatggcgcgcgctatatcctgatggaacggtttgccgaagatgccgcgctgctggcgaaagtgcgtgattatctgtggaagaacgcgcatttggtttctacggtggtgagcggtaaagaagaggaaggggcgaaattccgcgactatttcgatcatcacgaaccgttgtccacggtgccttctcaccgcgcgctggcgatgttccgtgggcgtaacgaaggcgtacttcagctttcgctgaatgccgatccacagttcgatgagccgcccaaagagagctattgcgagcaaatcatcatggatcaccttggcctgcgcctgaacaatgccccggcggatagctggcgcaaaggcgtggtgagctggacgtggcgcatcaaggtgctgatgcatctggaaaccgaactgatgggcaccgtgcgcgaacgtgcggaagatgaagcaatcaacgtctttgcccgtaacctgcacgatctgctgatggcggcccctgccggactgcgtgcaacgatgggcctcgatccgggtctgcgtactggggtaaaagtggcggtggtcgatgccactggcaaactggtggcgaccgacaccatttacccgcacaccggacaggccgcaaaagcagcgatgaccgttgctgcgctgtgtgaaaaacataacgttgaactggtagcgatcggtaacggtacagcttcccgcgaaactgagcgtttctatctcgatgtgcagaagcagttcccgaaagtgaccgcgcagaaagtaatcgtcagcgaagcaggcgcgtcggtttactcggcttccgagctggctgcacaggagttcccggatctcgacgtttcgctgcgtggcgcggtgtctatcgcccgccgtttgcaggatccgctggcggagctggtgaaaatcgatccgaaatctatcggcgtaggtcagtatcagcatgacgtcagccagacgcaactggcccgcaaactggacgcagtagtagaagactgcgtaaacgccgttggcgtcgatctcaacactgcttctgttccgctgttaacccgcgtggcgggcctgacgcgcatgatggcgcaaaacatcgttgcctggcgcgatgagaacggtcagttccagaaccgtcagcaactgttaaaagtgagccgtctggggccgaaagccttcgagcagtgcgcgggcttcttgcgcattaaccacggtgataacccgctggacgcgtctaccgttcacccggaagcctatccggtggtggaacgcattctggcagcaacacagcaggcactgaaagatctgatgggtaacagcagcgaactgcgtaacctgaaagcgtctgactttactgatgagaaattcggtgtgccgacggtaaccgacatcatcaaagagctggaaaaaccgggtcgcgatccgcgtccggaatttaaaaccgctcagtttgccgatggcgtcgagacaatgaacgacctgcaaccgggtatgatcctcgaaggcgcagtgaccaacgtcaccaactttggcgcgtttgtcgatattggcgtgcatcaggacggcctggttcacatctcttcattgtcgaacaagtttgtggaagatccgcataccgtggtgaaagcgggcgacattgtgaaggtgaaagtgctggaagtggatcttcagcgtaaacgtatcgccctgactatgcgcctggatgagcagcctggcgaaaccaacgctcgtcgcggcggcggtaatgaacgcccgcaaaacaaccgcccggcagccaaaccacgcggtcgtgaagcgcagcctgccggtaatagcgcgatgatggatgcgctggcggcggcaatgggcaaaaaacgttaaacgcccgtactggcctacggttcgaatttgcacgaaatcgtagggcagataaggcgttcacgccgcatctggcaacgaacgccttgcctgacataaaagtgccggagaatatctccggcatttttattccacagccaaactcataatatattccggcaatatttatcatttcattaacaactgaaaccttaattaaacattagccagtccgggtaattcactattcgaattatattttcgctgcgatataaccttgagccacatcaacattgagtcagattattattcaaaccaacattcgcacacattttaagtattgctgatagaaaccattctcattatcattgtgttgttgattatttaatctctcctttgttggcaaatcatctggtctcatgtcgctgtcaaacgccccatgaggtagttatccagttaatgagaaacaagtaggcacctatgcaatacactccagatactgcgtggaaaatcactggcttttcccgtgaaatcagcccggcatatcgccaaaaactgctttctcttggcatgttacctggctcctcttttaatgtggtgcgcgtcgctccactcggcgaccccattcatatcgaaacccgtcgtgtgagcctggtattacgcaaaaaagatctggccttattagaagtggaagcggtttcctgttaatacggtgataacaacaatgaaaaaattaaccattggcttaattggtaatccaaattctggcaagacaacgttatttaaccagctcactggctcacgtcagcgtgtaggtaactgggctggcgttaccgtcgaacgtaaagaagggcaattctccaccaccgatcatcaggtcacgctggtggacctgcccggcacctattctctgaccaccatctcatcgcagacctcgctcgatgagcaaatcgcctgtcactacattttgagtggcgacgccgacctgctgattaacgtggtggatgcgtctaaccttgagcgtaacctgtacctgacgctacaactgctggaactcggcattccctgcattgtggcactgaacatgctcgacattgccgagaagcaaaatattcgtattgaaattgatgctctgtcggcgcgtctgggctgtccggtgatcccgctggtttcaacccgtggtcgcggtattgaagcgctcaagctggcgattgatcgctataaagctaacgagaatgtggaactggtgcattacgcacagccgctgctcaacgaagcagattcactggcaaaagtgatgccttccgacatcccgctgaaacaacgtcgctggctgggcctgcaaatgctggaaggcgatatctacagccgcgcctacgccggtgaagcgtcgcagcatctggatgccgccctcgcccgtctgcgtaatgagatggacgatccggcgctgcacattgccgatgcgcgttaccagtgcattgctgccatctgtgatgtggtaagcaacaccctgacggcagaacccagccgtttcaccactgcggtagataaaatcgtgctcaaccgtttcctcggtctgccgattttcctctttgtgatgtacctgatgttcctgctggctatcaacatcggcggggcgttacagccgctgtttgacgtcggctccgtggcgctatttgtgcatggtattcaatggattggctacacgctccacttcccggactggctgactatcttcctcgcccagggcctgggtggcggcattaacaccgtgctgccactggtgccgcagattggcatgatgtacctgttcctctccttccttgaggactccgggtatatggcgcgtgcggcgtttgtgatggaccgtctgatgcaggcgctgggcttgccggggaaatcctttgtgccgctgatcgtcggtttcggttgtaacgtaccgtcggtaatgggtgcacgtacgcttgatgcaccgcgtgaacgtctgatgaccatcatgatggcaccgtttatgtcctgcggcgcgcgtctggctatcttcgcagtattcgcggctgccttcttcgggcagaacggtgcgctggcggtcttctcgctgtatatgctgggtattgtgatggcggtgctgactggcctgatgctcaagtacaccatcatgcgcggtgaagcgacgccgtttgtcatggagttgccggtctatcatgtaccacacgttaaaagcctgattatccagacctggcagcgtctgaaaggcttcgttctgcgtgctggtaaagtgatcatcatcgtcagcattttcctgagcgctttcaacagcttctcgctgagcgggaaaatcgtcgataacatcaacgactcggcgctggcgtccgtcagccgggtgatcaccccggtcttcaagccaattggcgtgcatgaagataactggcaggcaacggttggcctgtttacaggtgccatggcgaaagaagtggtagtgggtacgctcaacaccctctacaccgcagaaaatattcaggacgaagagttcaatccggcagaatttaacctcggtgaagagctgttcagtgcgatagatgaaacctggcagagcctgaaagacaccttcagccttagcgtactgatgaaccccattgaagccagcaaaggcgacggcgaaatgggtaccggggcgatgggcgtgatggatcagaaattcggtagcgcagcagcagcttacagctacctgattttcgtcctgctgtatgtaccatgtatctcggtgatgggggctatcgcccgtgaatcaagccgtggctggatgggcttctccatcctgtgggggctgaatatcgcttactcactggcaacattgttctatcaggtcgccagctacagtcagcatccaacttacagcctggtgtgcattctggcggttatcctgtttaacatcgtggttatcggtctgctgcgccgcgcgcgtagccgggtggatatcgaactgctggcaacccgcaagtcggtaagcagttgctgcgcagccagcaccaccggtgattgccattaatggcttcacttattcaggtgcgcgatttgctggcgttacggggccgtatggaagcggcccagataagccagacattgaacactccacagccaatgattaacgccatgctgcaacaactggaaagtatgggcaaagccgtgcggattcaggaagaacctgacggctgcctctctggcagttgtaaaagctgcccggaaggaaaagcctgtctgcgcgagtggtgggcgctgcgttaaccttactccatcgcctgttttggaaagcccggtatgcgtctgcatccgggcttttttgcgtgcggctttccataaaaatgcaactcttgcagcacggcgtaagttcctttgaaagcatctcgcagggatgaaaactcgctaatacacaggtgtggagtggcgcgtagagtcgcggcattcaaacaacaggtgaaggaacgccatgagcaaaaagcagagttccaccccacacgatgcgctgttcaaactctttttacgccaaccggacacggctcgtgattttcttgcgtttcatttaccggcacccattcacgcgctttgtgatatgaaaaccctcaagctggagtcgagcagctttattgatgacgatctgcgtgaaagctattccgatgtgctgtggtcggtgaaaacggaacaaggaccaggatacatctattgtctgattgaacatcaaagcacctcaaacaaactgatcgcatttcgcatgatgcgttacgctattgccgcaatgcaaaatcaccttgatgctggatacaaaacgttgccgatggtggtgccattgttgttttaccacggtattgaaagcccctatccctattcgctgtgttggctggattgtttcgccgatcccaaactggcaaggcagctttatgcctccgcatttccgctgattgatgtcaccgtcatgcctgatgatgaaatcatgcagcaccgacgtatggcgctgctggagttaattcaaaaacatattcgtcaacgcgacctgatggggctggtagagcaaatggcctgcttattaagtagtggatacgctaatgacagacaaatcaaagggctgtttaattacatactgcaaactggcgacgctgtacgttttaacgattttatcgacggcgttgccgaacgttcaccgaaacacaaggagagtttaatgactattgcggaaagattgcggcaggagggggaacaatccaaagccctgcatatagccaaaataatgcttgaatccggagttcctcttgcagacatcatgcgctttaccgggctgtcagaagaagagttggctgcggcgagtcagtaaagttctgtctcgccatttcaaaagccacctacaccctctgcttcaacgccaccagcaggtgacaaaactcggccggatgcgaaataaatggcgcatgggccgctttggcgaagatatatgattcgctgtgaggccaaagtttatccagcatcggcaccactttgcgcggcaccagaccgtcgagatagccatacaatcgcaaaaacggcatggacacgttttgcagcggctgacggagatcgaccgttttcaggatttccagcccgccattaagcacgtcaacctccggcatcggtaacgccagaacggttttcttcaacgcccgcgcatcctggcgcgccgtttcagtccccatggtttgtaacgccaggaaccgctccactgtacgctgaaaatcatcactgagttgctgctgaaatcccgccagcacgtccggttttatccccggccactcgtcacgagcactaaaacaaggtgacgacgccacggtgaccagcgcctgaacacgctcgggatgggttaacgcaatctggcttgccaccagcccgcccagactccagcctaaccaaatggctttatcaggtgcctgttgcagcacggcttcggccatatcagcaagtgacagcgcaccaaatccccggctacgcccgaagccgggcaggtcaacaaggtgcagcgtaaaatgcgagctaagttcctcgtcaatgcaacgccacacttcggcattcagtccccatccgtgcagcagcacaagatgaacattcccctgacctttggtctgccaccagatgttattcatccgctattgttctcttttgacttacaaggatgaacatatgctaacagtaccgggattatgctggctatgccgaatgccactggcgttaggtcattgggggatttgttcggtctgttcacgcgccacccgcacagataaaacgttatgcccacaatgtggattacccgccacacactcccatcttccctgcggtcgctgcctgcaaaaaccgccgccctggcaaagactggtcacggttgccgactatgcgccgccgttaagtccgcttatccaccagcttaaattttcccggcgcagtgaaatcgccagcgccctgtcacgtctgttactattggaagtcttacacgctcgtcgcaccaccgggttgcaattgccggatcgcatcgtcagcgttccgttatggcagcggcgtcactggcgtcggggatttaatcagagcgatttgctgtgtcagccgttatcacgctggttgcactgccaatgggatagcgaagccgtcacacgtacacgggccactgcgacccagcattttctcagtgcccggctgcgcaagcgcaacctgaaaaatgcctttcgtcttgaattgcccgtgcaaggtcgccatatggtgattgtggatgatgtcgttaccaccggaagtaccgtcgcagagattgcgcagttgcttttacgcaatggtgcggcggctgtccaggtctggtgcctttgtcgaaccttgtagagcctcgatgatgggcgtattataaccaactaaaatagtcaactattaggccattactatgatccgtatttccgatgctgcacaagcgcactttgccaaactgctggcaaatcaggaagaagggacacaaatccgcgtatttgtgattaaccctggcacgcctaacgctgaatgtggcgtttcttattgtccgccggacgctgtggaagccaccgacacagccctgaaatttgacctgctgaccgcgtatgttgatgagttaagcgcaccatacctggaagatgcagagatcgattttgttaccgaccagttgggttcccagttaacgctgaaagccccgaacgccaaaatgcgtaaagtggcagacgatgcaccgctgatggagcgcgtggagtatatgctgcagtcgcagatcaacccacagcttgctggtcacggtggtcgcgtttcgctgatggaaatcaccgaagacggttacgccattctgcaatttggcggcggctgtaacggttgttccatggtcgatgtgacgctgaaagaagggatcgagaagcagctgctgaacgaattcccggagctgaaaggtgtgcgcgatctcaccgaacaccagcgcggcgaacactcctactactaagttatcccctcttttgtagattgcccgatgcgacgctaaagcgtcatttcgggcctacgttgaacatgtgccagacgttggcgcagcattgctttgtcaaatcctcggttcgtttccccgcgataatatgaccaacctctcataatttaaatttaccccgctctggtgattctcaaacgccagatgttacccgtatcattcacatgggtaccaaacatactcctgacatctgactacaataattagttttagtgggtatcagtcgtggtgccgcaatatctctgttcccgattgggataattagagtttgtcgtcagaaaattgacgttacccataacaaatgaaaggccaggtaaatcatgccattagtcattgttgctatcggtgtaatcttgttgttgctcctgatgatccgcttcaaaatgaacggcttcatcgctctcgtcctcgtggcgcttgctgttggattaatgcaaggaatgccgctggataaagttattggctccatcaaagccggtgtcggcgggacgctcggtagccttgccctgatcatgggttttggcgcaatgctgggcaaaatgctggcagactgcggtggcgcacaacgtatcgccaccacgctgattgccaaatttggtaaaaaacacatccagtgggcggtggtactgaccggttttaccgttggttttgccctgttctatgaagtgggctttgtgctgatgctgccgctggtgtttaccatcgcggcttctgcgaatattccactgctgtatgttggtgtaccaatggcggctgcactgtctgtgacccacggcttcctgccaccgcatccgggtccgactgcgattgccaccattttcaatgccgatatgggtaaaaccctgctgtacggtactattctggcaatcccgaccgtgattctcgccggtccggtttacgctcgcgtgttgaaaggtatcgataagccaattccggaaggtctctacagcgcgaaaaccttcagcgaagaagagatgccgagctttggcgtcagcgtctggacctctctggtgccggtagtactgatggcgatgcgtgcgattgccgaaatgatcctgccgaaaggtcacgctttcctgccggtagcggagttcctcggtgacccggtaatggcaacgctgattgccgtgctgattgcgatgttcacctttggtctaaaccgtggtcgttcaatggatcagattaacgacacgctggtttcttccatcaaaatcattgcgatgatgctgttgatcatcggtggtggcggtgcgttcaagcaggtgctggtagacagcggcgtggacaaatacattgcttccatgatgcacgaaaccaacatttctccgctgctgatggcctggtcgattgctgccgtactgcgtatcgcgctgggttccgcaaccgttgcggcaatcactgcgggtggtatcgcggcaccgctgattgcaacgacgggtgttagcccggagctgatggttattgcggttggttccggtagtgtgattttctctcatgtgaacgatccgggcttctggctgttcaaagagtactttaacctgactatcggcgagaccatcaaatcctggtcgatgctggaaaccattatctcggtgtgcggtctggtaggctgtctgctgctgaatatggtgatttgataacactgactgccggatgcggcgtgaccgccttatccggcctacgattcgggatgaattagtaggccggataagacgcgtcaagcatcgcatccggcatcaaccgcactctacttcttcttcgctgcagctctgcgccgtctgtccaaatccttcagcaacttgttcacgccatcatcggcaaacatcgactcaagcgttgcggaaagcttgcgtcgccagtttttatactggtaactggtgccaggaatattcaccggttcggccatatccagccagtcttccggctgtagtcctaacagagcactgttactgtcggcaatgtagcgctgcaaaccacggttcagcgtcggcgtcatcgacatcaacgatgccttatgcccggcacgtttcggcagacaaccatatttatgcagtgcatccagcagcccttgcttcgccagttcgcgatcctgatacagaccgcgcagtaccacttcatccggatacagccccagggttttgcccagcgttagatccccgcactcccagtaaccgcgcagcgttggcaggtcatgtgtcgccgcaaccgccatcgactgctccggatacgctttcggtgcacggaacgtcttctcgtggtcgttttcgaaatagagcactttgtaagagtacacaccgctgctgcgcagcttaccgacaatctctaccggtacggtaccgagatcttcaccaatcaccatacagcgatgacgtttactttcgagtgccagaatcgagagcagatcatccaccggatagtgaacatacgcgccctgatctgccgtctcgccatacggtatccaccacaaacgcagcatcgacatcacatggtcaattcgtaatgcgccgcagttttgcatattggcacgcaacagctcgataaacggttcataggcacgcgcggtgatgatatgcgggtccattggcggtaatccccagttctgccccaacgggccgaggatatccggcggcgcgccaaccgatgctttcaggcaatatagttcacggtcacaccaggtttccgccccaccttccgctacgccaaccgccagatcacgatacaagccaatcggcatttcatagccctggcttatctcccagcaggcggcaaactggctgtaagccagccactgcaaccagagataaaaatcgacgtcatcacgatgttcttcgcagaactgacgcacttctggtgaatccacgttctgatacatctctggccatgcaggccagccccagcgcatttcgtcctctttcacttgctgggcatgtagcgcatcaaaggctgcctgccagaacaggctgtcgccctgctctgcaacaaactggcgaaacgcggccatctgctcatcatcacgttgcgcgaaacctttccacgccattcgtaatgctgtcatttttagggcggtaaccgtggagtaatcgacccagtcggcatcgcgcgcctgttgcagcgtctgttgcgtggtcggcaactgccaccaggcctgagcctcttcgctaagatggaaatcttcaacggcgttaacgtcgatataaatcacattcagccaacggcgagaagacgggctgtatgggctggcgctctccggatttgccggatagagcgcatgaatcgggttcaggccaatgaacgacccgccacgttttgccacatccaccagcatcgctttgagatcgccaaaatccccaataccccagtttttttccgatcgcagcgtataaagctgaacgcaggcaccccacagcttttgtttattcagcaacgcctgcggttcgtaacagcgtttcggggcgacaatcacccggcaatgcgcgcgctggtcgtcctgggtgagtgtcagcgtgtgataaccttccggcagcttcgtcggtagattgaacgctttgccccccgttacatggcctttgtactgcgttccttcttcggtggtcagcagccagctatattcgccgctgccctccaccaccatcggcatttttttgccgctggtataaaccatgacattcgggactggcgttaccgccactttcgtggcggtacgttgatgcatcgcgtcaagcaaacgccgtttggtttcggcgctaatcgactgcggtttaccgtgggcattgatgtaattggggctaatccccgccgccagcgcggcattatccagacgtttgctttccatcgagcttccttagcgttttgcctgccagatacgagcctgataatcgcgaatagagcgatccgagctaaacataccgcagcgggcggtattgaggatcgccgcgcgagtccaggcctcctggtcgcggtacagcacatccacctgcttttgtgcctctacataggctgcgaaatccgccatcaccagatacggatcgccgccctgtttgccgatactgtgcagcatctggtcgaaggcatgcttatcgccgtcgctgtatttaccgctttccagctctttcaatactgcgtccagcaccttatctttcttccgccatttcaccgggtcgtagcctttggccagaattgccttcacttgttccacggtatgaccaaaaataaagatattttcttcaccgactttctcggcgatttcaacgttcgccccatccagcgtaccgacagtaagcgcaccattgagcgccagtttcatattgccggtaccggaagcttctttacctgcagtcgaaatttgttcggagatatccgccgccgggatcagtttttccgccgccgaaacgcaataatccggcaggaacaccaccttcaacttatcgccaaccagcggatcgttgttgatcacgtcagccactttgttgatcgcaaagataatattcttcgccaggtagtagcccggtgccgctttcgcgccgaagaggaagacgcgcggtacgcgatcagcctgcgggttttcacgaatttctttgtacaacgccagaatatgcagcagattcaggtgctggcgtttgtactcatgcaaacgtttgatctgaatatcgaaaatcgcctgtggattgatctcaataccggtacgaactttcacaaactccgccagacggactttattcgcctgcttgatctcgcgatattgctgacggaatttcgcatcatcagcgaatttttccagattgatcagctgatcgagatcgttagcccactctttttgcagtgatttatccaacagagccgccagtgccgggttgcactgtttgatccagcgacgtggggtaataccgttggtgacgttatggaatttgttcggccatagctggtgatattccgggaacagatctttcaccaccagatccgagtgcagcgccgcaacaccgttcaccgcgaaaccgccaaccacacacaggttcgccatatgcacttgtttgtcgtgcaccaccgccagtttggcccacactttttcatcgcccggccaggttttctctaccagcgttttaaagcgagtattaatttcgttaataatctgcatgtggcgcggcagtaagcctttcaccagtttcacatcccagcgttccagcgcttctggcatcagggtatggttggtgtaagcgaaagttttgctggtaatggcccaggcgtcatcccagctcatctggtgctcatcgatcagcacgcgcagcagttctggaatcgcgatagttgggtgggtatcgttcagctgaataacttcgtaatccgccagttcgtgcagtttacgccccgccagatgatggcgacgcaaaatatccgctaccgaacaggcacactggaagtattgctgcatcaggcgcagctttttaccggcagtatggttgtcgtttggatagagaactttggtcagtttttccgcattgatgccctgctgttcggcacgcaagaaatcaccgtcgttaaatttagtcagatcaaacggatgcgcgtgcgtcgcctgccacagacgcagcggctgcgccacgccattacgatagccgacaacggggagatcccacgcttgaccggtaatggtaaactccggctcccagcgtccgtctttcgtcactttaccgccaatccctacctgcacatccagtgcttcgttgtggcggaaccacgggtagttactgcgatgccagtcatccggcgcttcaacctgtttgccatcgacaaaagactggcggaacaaaccatattgatagttcagaccgtaacccgtcgcagactgaccgacagttgccattgagtcgaggaagcacgccgccagacgtcccagaccaccgttacccagcgccgggtcgatctcttcttccagcaggtccgtcagattgatgtcataagccttcaacgaatcctgtacatcctgataccagccgagattcaacaggttgttgcccgtcaggcgaccaatcaaaaactccattgagatgtagttaacatgtcgctgattcgccaccggcttggcgaatggctgagcacgcagcatttcggccagtgcttcactcactgctagccaccactggcgaggagtcatttcagccgcagaatttaagccataacgctgccactgacgtgaaagcgcttcctgaaattgcttatcgttaaaaataggttgtgacataggagttccacttttcttagattttcaacacaacgttatcgctagtttgccaggctcgatgttgaccttcctcatcctgcgggggattaggcagggaggagttgcggggatgagcaaggaaatgtgatctcaaccacttaaagctagtgcaaaccacaggattagcatcaaatcaatgcaatacagcgcagaaaatctgtatctaagtgcaaaaaatggccgttgcgtattttcaaaaagcggaaggtaactctataaattaagtaaaggagtgaaacagtttcataagtaaaatatccagtgtgctccatctcattcttaatagatttattaagatcatctttttagatggcactttcatcaggaatgaagaagaaacccttgcttaaatgaatctgatgaacataagggaaaccagtattcacgctggatcagcgtcgttttaggtgagttgttaataaagatttggaattgtgacacagtgcaaattcagacacataaaaaaacgtcatcgcttgcattagaaaggtttctggccgaccttataaccattaattacgaagcgcaaaaaaaataatatttcctcattttccacagtgaagtgattaactatgctgattccgtcaaaactaagtcgtccggttcgactcgaccataccgtggttcgtgagcgcctgctggctaaactttccggcgcgaacaacttccggctggcgctgatcacgagtcctgcgggctacggaaagaccaccctcatttcccagtgggcggcaggcaaaaacgatatcggctggtactcgctggatgaaggtgataaccagcaagagcgtttcgccagctatctcattgccgccgtgcagcaggcaaccaacggtcactgtgcgatatgtgagacgatggcgcaaaaacggcaatatgccagcctgacgtcactcttcgcccagcttttcattgagctggcggaatggcatagcccactttatctggtcatcgatgactatcatctgatcactaatccagtgatccacgagtcaatgcgcttctttattcgccatcaaccagaaaatctcaccctggtggtgttgtcacgcaaccttccgcaactgggcattgccaatctgcgtgttcgtgatcaactgctggaaattggcagtcagcaactggcatttacccatcaggaagcgaagcagttttttgattgccgtctgtcatcgccgattgaagccgcagaaagcagtcggatttgcgatgacgtttccggttgggcgacggcactacagctaatcgccctctccgcccggcagaatacccactcagcccataagtcggcacgccgcctggcgggaatcaatgccagccatctttcggattatctggtcgatgaggttttggataacgtcgatctcgcaacgcgccattttctgttgaaaagcgccattttgcgctcaatgaacgatgccctcatcacccgtgtgaccggcgaagaaaacgggcaaatgcgcctcgaagagattgagcgtcaggggctgtttttacagcggatggatgataccggcgagtggttctgctatcacccgctgtttggtaacttcctgcgccagcgctgccagtgggaactggcggcggagctgccggaaatccaccgtgccgccgcagaaagctggatggcccagggatttcccagcgaagcaattcatcatgcgctggcggcaggcgatgcgctgatgctgcgcgatattctgcttaatcacgcctggagtctgttcaaccatagcgaactgtcgctgctggaagagtcgcttaaggccctgccgtgggacagcttgctggaaaatccgcagttggtgttattgcaggcgtggctgatgcaaagccaacatcgctacggcgaagttaacaccctgctagcccgtgctgaacatgaaatcaaggacatcagagaagacaccatgcacgcagaatttaacgctctgcgcgcccaggtggcgattaacgatggtaatccggatgaagcggaacggctggcaaaactggcactggaagagctgccgccgggctggttctatagccgcattgtggcaacctcggtgctgggtgaagtgctgcactgcaaaggcgaattgacccgctcactggcgctaatgcagcaaaccgaacagatggcacgccagcacgatgtctggcactacgctttgtggagtttaatccagcaaagtgaaattctgtttgcccaagggttcctgcaaaccgcgtgggaaacgcaggaaaaagcattccagctgatcaacgagcagcatctggaacagctgccaatgcatgagtttctggtgcgcattcgtgcgcagctgttatgggcctgggcgcggctggatgaagccgaagcgtcggcgcgtagcgggattgaagtcttgtcgtcttatcagccacagcaacagcttcagtgcctggcaatgttgattcaatgctcgctggcccgtggtgatttagataacgcccgtagccagctgaaccgtctggaaaacctgctggggaatggcaaatatcacagcgactggatctctaacgccaacaaagtccgggtgatttactggcaaatgaccggcgataaagccgccgctgccaactggttgcgtcatacggctaaaccagagtttgcgaacaaccacttcctgcaaggtcaatggcgcaacattgcccgtgcacaaatcttgctgggcgagtttgaaccggcagaaattgttctcgaagaactcaatgaaaatgcccggagtctgcggttgatgagcgatctcaaccgtaacctgttgctgcttaatcaactgtactggcaggccggacgtaaaagtgacgcccagcgcgtgttgctggacgcattaaaactggcgaatcgcaccggatttatcagccattttgtcatcgaaggcgaagcgatggcgcaacaactgcgtcagctgattcagcttaatacgctgccggaactggaacagcatcgcgcgcagcgtattctgcgagaaatcaatcaacatcatcggcataaattcgcccatttcgatgagaatttcgttgaacgtctgctaaatcatcctgaagtacctgaactgatccgcaccagcccgctgacgcaacgtgaatggcaggtactggggctgatctactctggttacagcaatgagcaaattgccggagaactggaagtcgcggcaaccaccatcaaaacgcatatccgcaatctgtatcagaaactcggcgtggcccatcgccaggatgcggtacaacacgcccagcaattgctgaagatgatggggtacggcgtgtaagtttagccggataacgcgccagatccggcttacatctctgcatcattcaatgctcacccgcgttacgccatctgtttctatcaaactaaaccgcaccggcaagaaacgctccaccaccgcgatattggtcagcagatggcatgagggatgggcgaccgtaaattcccccgcgcccgccagcgccatcggtagcaccagttggtcagcaagatattcccccaccgccgccgtgcttgccaggtagcgtttcacctctttcaccaactgtgccgcaaccacctcggcactgacgcgcttttcaccgacgacaaaaaagcgttcggtgatattttcactttcgacttcaagcgagacggtattacccggcccctggtcgcgcggcaggttatgaatattctgttcatgcagggaaaaactccccgccagtgtagcgatttcacgctcagcaacatggcgcggcacaccagctaatagaacttctccacgcatctgcacaatgttcccgcgctcgccaagttgcaaggtgttaaacgatgccacgggcgagacttccgttgccaccacaccgcctccggcagggtaaaaaccgtggcgtaacagcgtggtttgctgatgaattcctattttcgccagcagcggctccagcacccggcggataaaatccgcaggcggcgccgacgggttatcggtgccgccgctcacttcaacacgcgaaggtccatcggcaaaccacagcgcgggcagcaccgtttgcagcaccagcgtacaacttccggcgctaccgatagcaaagcggtaatcgccgccgcgcacggtgccgggccggaagagcagacgctgcgaccccagctccgcgccttccacggttgctccgcaaatttccgtcgccgcctttaccgcggtcagatgctggcgcaacagccccggtttcgcccgcccggcacgaatgctggtgatggtaaatggctggccggttatcatcgacaggctcagcgccgagcgcaggatctgcccgccaccttcgccctgtgcgccatccagcgcaatcatccttttcatcatttatccttttacgcacaccacctgacgcagggtatagataacttccaccagatcgctttgtgccgccatcaccgcatcaatatctttatacgccatcgggatttcgtcgatcacttcggcatctttacggcattccacatgcgcggtggcacgaatttgatcttccacgctgaacagttttttcgctttagttcggctcattacccgcccggcaccgtggctgcacgaacagaacgactcttcatttcccagcccacggacgataaagctttttgctcccatcgaaccgggaataattccatattgaccagcacgcgcagacaccgcgcctttacgcgtcacgtagatctcttcaccaaagtgctgttctttttgcacatagttgtggtgacagttgatctcttccatcgccagcgtttgtggctgtctgaccgttttctgcgtaatgctctgcaatgccgttaccacgttttccatcatcgcatcgcggttaaggctggcaaaaagctgcgcccaggccacggctttcaggtaatcatcaaagtattccgtaccttccataaagtacgccagatcacgcgacggcaacgtctcaagcgtttcctgcatctctttttgtgccagatcgataaagtaagtcccgatggcgttaccaattccgcgtgaaccggagtgcagcataatccacacctggtccgactcatcaaggcagatttcaataaagtggttaccggttcccagcgttcccaggtgtttatagttattggtattcaggaaacggggatatttttgcgttaaccactgataaccggcttcaagctcagcccatttagcatcgacgttaacaggtggattttcccaggcacctttatcacgtttacaacggccagtggtacgcccgtgcggcacggccgtttcaatcgcctgacgcagctctgccaggttttcaggcaggtcttccgccgttaacgcggtacgcagcgcgttcattccacagccaatatccacgcccaccgccgccggaataatcgcccctttggtcgggatcacgctaccaatggtggaacctttacccaggtgtacatcaggcattaccgcaatatgtttgaaaataaacggcatcttcgccgtattaataagttgctgacgcgcatcggcctctaccggcacgcctttggtccacatttttaccggggcattttcagtggtcagtaattcgtaattcattttgtttttctcttttcgttgtttgctgtcctgataattgcaaccgtcgtgccagaaaattaaataagcagcttaattttttaattcattgttttaaaaaagattatatctttacgtccgtaaccggagatttcccgcaaagccaatttaccgataatgaaatatcgtcttttataaggatatctaagatgcgtaaaacagtggcttttggctttgtcggtaccgtactggattatgccgggcgcggcagtcagcgctggtcaaaatggcgtccgacactctgtttatgccagcaagaatcgttggtcatcgatcgactggaattgttgcacgacgcccgctcgcgctcgctatttgaaacgcttaaacgcgatatcgccagcgtttcgccagaaacagaagtggtgagcgttgagattgaactgcataacccgtgggatttcgaagaggtctacgcctgcctgcatgatttcgcccgtggttacgagtttcagccagaaaaagaagactatttaattcacatcaccaccggtacccacgtcgcgcagatttgctggtttctgctggcagaagcgcgttacctgcccgcccggctgatacaatcttcacctccgcgcaaaaaagaacagccgcgcggcccaggtgaagtaacgattatcgatctcgatttaagccgttataacgccatcgccagccgctttgccgaggaacgccagcaaacgcttgattttcttaagtccggcattgccacgcgtaacccccacttcaaccgcatgattgagcagatcgaaaaagtggcgatcaaatcccgcgcgccgattctgcttaacggtccaaccggcgcgggcaagtcatttctggcgcgacgcatcttagagttaaaacaggcgcggcatcagtttagcggcgcgtttgtggaagtgaactgcgccaccctgcgcggcgataccgccatgtcgacgctgtttggtcatgtaaaaggcgcgtttaccggggcgcgggaatctcgtgaaggtttattacgcagcgccaacggcggaatgttgtttcttgatgagattggcgaactgggcgcagacgaacaggcaatgctgctgaaagccattgaagagaaaaccttttacccgtttggcagcgatcgccaggtgagcagtgattttcagcttatcgccggaacggtgcgcgatttgcgccagctggttgccgaaggcaaatttcgcgaagatctgtacgcgcggatcaatctctggaccttcaccctgccgggtctacgccagcgccaggaagatattgaaccgaacctggattatgaagtggagcgccacgcctcactcactggcgacagcgtgcgttttaacaccgaagcgcggcgcgcctggttggcttttgcgacctctccccaggcaacatggcgcggtaactttcgcgaactttctgccagcgtcacgcggatggccacctttgccactagcggacgcatcactctggacgtggttgaagatgagataaaccgtctgcgctataactggcaggagagccgcccctccgcgcttacggcgttgctgggcgcagaggcagaaaacatcgatctcttcgaccgtatgcaactggaacacgttatcgctatctgccgccaggcaaagtcgctttccgcagccggacgccagctttttgacgtttcgcgccagggcaaagccagcgtcaatgacgcggatcggctacgcaaatacctggcgcgttttggtctgacgtgggaagccgtgcaggatcagcacagctccagttgaatatggtggtccgtcagcacctgcatcacgcttactggcggcggggcgtcggtgtagacggcatctaccatgctgatgctgcccatattgaccatcgcgttacggccaaatttcgagtgatcgacaaccagcataacgtggcgcgagttctcaataatggcgcgtttggtgcgaacttcgtggtaatcgaactccagcagcgagccgtcgctatcgatgccgcttatccccagaatgccgaaatcaaggcggaactgggagataaaatcgagcgtcgcttcgccaatgatcccgccatcgcggctgcgtaattcgccaccggcgagaatgatgcgaaaatcttcttttaccatcaacgtgttagcaacgttgagattgttggtgacaatgcgcaaattgctgtgattgagcagtgcgtgcgctaccgcttccggcgtggtgccgatatcgataaacagcgtcgagccattggggatttgctccgccactttgcgggcgatgcgctctttttcttcggtctgggtggccttgcgatcgtgccacggcgtgttaaccgaactggaaggcagcgccgcaccgccatgatggcgcaggatcaggttttgctccgccagctcattgaggtcgcggcgaatagtctgcgggctgacggagaaatgctctaccagctcttcggtactgacataaccctgctgtttaaccagttcgataataccgttgtgacgttgtgtttgtttcatttataaatccctggaattattttcgttttcgcgcattgagcgaatcaacaaaagccatcgctaaacccacggctaacccggcgatgtgtgctccgttcgccatcgacatcccaaacaaatcaaaccatccggcgacaatccagatcagcgcaaagataattaacccacgttgcaggtaaatgccactttgcggatcgcgttcgccacgtagccagacgtagcccatcagcgcatacaccacgccagaaagcccgccaaaccacggcccgctgaatttttgctgcacatagccgcttaacagggcgctgataagcgtaatgacaattagcttaccgctaccgaggcgtttttccaccgcaccgccgagataccaccaccagagcaggttaaagaggatatgcatcagcgagaagtgcattaacgcgtgggtgaagtaacgccagaactcaaatttcagtgttggatcgaatggccaggccagccataacatcacttcctgatcgccgagaatttgcatggcaataaacaccaccacgcaggcgatcatcatcacccaggttaccggacctgcgcgttcacgcaaggcggcaaagaaaggataacggcgataatgcaggccactgccggtatggcctgcctgccagctcgccgccagataacgcggatctgccgggttttcgagaaaacgcgccagctccgcccgtacgcgctcggcctgggactcatccgccagccagacatcgctttggttatgttgttgaatcgtgaggataacaccctgcgtcgccatgtaatcaacaaacgcctgcgccacgcgggggttagcaaaagaggtaatcatcaacatcgttgctgtcgcttattccacacaaaaggggacagtataaagcgttacgcgccgtacgccacctctgcgggaaactgacgttgccaggcttcaaagccgccgtcaatgctatagaccacatcgtagccctgttgcagcagatactgcgccgcgcctttgctgctattgccgtgataacacatcaccatcaccggagtgtcaaagtcgttatcacgcataaaagcgcccagcgtgtcgttggttaaatggaaagcctgcaccgcatgtcccattgcgaaactctgtggatcgcgaatatcgaccagcaccgcctctttttcctgcaacttctggtgcgcgtcggcaacgttaatacattcgaactgatccatgcgtctctctttctttacaaacaagtgggcaaatttaccgcacagtttacgtcgaagcggcagataaacgccataatgttatacatatcactctaaaatgttttttcaatgttacctaaagcgcgattctttgctaatatgttcgataacgaacatttatgagctttaacgaaagtgaatgagggcagcatggaaaccaaagatctgattgtgatagggggcggcatcaatggtgctggtatcgcggcagacgccgctggacgcggtttatccgtgctgatgctggaggcgcaggatctcgcttgcgcgacctcttccgccagttcaaaactcattcacggtggcctgcgctaccttgagcactatgaattccgcctggtcagcgaggcgctggctgaacgtgaagtgctgctgaaaatggccccgcatatcgccttcccgatgcgttttcgcctgccacatcgtccgcatctgcgcccggcgtggatgattcgcattggtctgtttatgtacgatcatctgggtaaacgcaccagcttgccgggatcaactggtttgcgttttggcgcaaattcagtgttaaaaccggaaattaagcgcggattcgaatattctgactgttgggtagacgacgcccgtctggtactcgccaacgcccagatggtggtgcgtaaaggcggcgaagtgcttactcggactcgcgccacctctgctcgccgcgaaaacggcctgtggattgtggaagcggaagatatcgataccggcaaaaaatatagctggcaagcgcgcggcttggttaacgccaccggcccgtgggtgaaacagttcttcgacgacgggatgcatctgccttcgccttatggcattcgcctgatcaaaggcagccatattgtggtgccgcgcgtgcatacccagaagcaagcctacattctgcaaaacgaagataaacgtattgtgttcgtgatcccgtggatggacgagttttccatcatcggcactaccgatgtcgagtacaaaggcgatccgaaagcggtgaagattgaagagagtgaaatcaattacctgctgaatgtgtataacacgcactttaaaaagcagttaagccgtgacgatatcgtctggacctactccggtgtgcgtccgctgtgtgatgatgagtccgactcgccgcaggctattacccgtgattacacccttgatattcatgatgaaaatggcaaagcaccgctgctgtcggtattcggcggtaagctgaccacctaccgaaaactggcggaacatgcgctggaaaaactaacgccgtattatcagggtattggcccggcatggacgaaagagagtgtgctaccgggtggcgccattgaaggcgaccgcgacgattatgccgctcgcctgcgccgccgctatccgttcctgactgaatcgctggcgcgtcattacgctcgcacttacggcagcaacagcgagctgctgctcggcaatgcgggaacggtaagcgatctcggggaagatttcggtcatgagttctacgaagcggagctgaaatacctggtggatcacgaatgggtccgccgcgccgacgacgccctgtggcgtcgcacaaaacaaggcatgtggctaaatgcggatcaacaatctcgtgtgagtcagtggctggtggagtatacgcagcagaggttatcgctggcgtcgtaaattaacgtaaggtgatcaggtcagatttcaatctggcctgagactgatgacaaacacaaaactgcctgatgcgctacgcttatcaggcctacgtggtttatgcaatatattgaatttgcatggtcttgtaggccagataagacgttcacgtcgcatccggcatgaacaaagcgcactttgtcaaaaatctaacctactttttaattcagggaattaccgcaaagcccacgccatcatacccaacgtaacaaaactcaggcacgttccccactcgccccgagaaaaatagcattaatgcgcccagcgccagcataaaaattttgagcagaaggtaaattgttggcgtgataaggatattacaaacttcaataataccggcaagtccgacacccagcatggcaataaccaccgccaaaaattgcgccagtatggggatgccgaaaaaagtcattaccagcgaggtcaaaatccattttctgttttgcattattctttccattctttttgaatggtgaaattatactccccgagtccccttgccccttctggacacttttccgaaatgatggcggaaaaaaacgggaccctttggccccgttctatttattggtgaacttacaatctcaccggatcgatatgccagatatgatcggcgtactctttgatagtacggtcagaagagaagtagcccatattggcaatgttcagcatcgcttttgcggtccactcttcctgaagctcgtagagttcatcgactttatcctgacaatcgacatagctgcgataatccgccagtacctggtagtgatcgccgaagttgatcagcgaatcaaccagatcgcgatagcgacccggatcttccggactgaatacaccgctgccgatttgcgtcagcacctgatgcagctcctcatctttctcgtagtattcacgcggtttgtagccctgacgacgcagttcttccacttcttccgctgtgttaccaaaaataaagatattgtcagcaccgacatgatccagcatctcgacattcgcaccgtccaacgtaccgatagtcagcgcaccgttaagcgcaaacttcatgttactggtgccggaagcttccgtccctgccagcgaaatctgttcagacagatctgccgccggaatgatcaactgcgccaggctaacgctgtagttcgggatgaacacgactttcagcttatcgccaatctgcggatcgttgttgatcactttcgctacgtcattgatcaaatgaataatgtgcttcgccatgtaataggccgaagccgccttaccgccaaaaatattcacgcgcggtacccacttcgcatccgggtcggccttgatgcggttatagcgggtaatcacatgcaacacattcatcaattgacgtttgtattcgtgaatacgtttgatttgtacatcgaacaacgcctttggattcaccaccacattcagctgctgggcgatatactctgccagacgctttttgttctccagcttcgcctgatgcacagcgtgattaaccattgggaaatcacagtgttgttgcagctcattaagcaggctaaggtcggtgcgccagttacggcccaggtgttcgtccagcacggctgaaagcgatgggttcgctaccgccagccagcgacgcggcgtcacaccgttggtgacgttggtgaaacgacccgggaagattttcgcaaagtcggcaaacaacgattgcaccatcagattagagtgcagttccgatacaccgttaactttgtggctcacaacaaccgccagccaggccatacgcacacgacgaccgttggattcatcaatgatcgacgcccgtcccagcagatcggtatcgttcggatactgttcctgcaaggttttcaggaaatagtcgttgatttcaaagatgatctgcaggtgacgcggcagaattttacccagcatatcaaccggccaggtttccagcgcctcgctcatcagcgtgtggttagtgtaggagaagacctgacaacacacctcaaacgcgtcgtcccagctaaattggtgctcatcgatcagcagacgcatcatctcaggaatcgacagtaccggatgggtatcattgagatgaatcgcgattttatccgccaggttatcgtaggttttatgcaactgataatggcggcttaaaatgtcctgaatggtcgaggaaaccaggaagtattcctgacgcaggcgcagctcacgcccggagtaggtggagtcatccggatacagtacgcgagatacgttctcggagtggtttttatcttccactgccgcgaagtagtcaccctggttgaatttaccgaggttaatttcgctactggcttgcgcactccacaaacgcagcgtgttggtcgcgtcggtgtcgtaaccagggattatctgatcgtaagcgactcccagaatctcttcggtttcaatccagcgcgtttttttaccttcctgctgaatgcgaccgccaaaacggactttatagcgcgtgttgtggcgtttgaattcccacgggttaccgtattccagccagtagtctggcgactctttctggctaccgttaacgatgttctgcttgaacataccgtagtcatagcggatgccgtaaccgcgccccggcaaccctaacgtcgccagagaatcaaggaagcaagccgccagacgtcccaggccaccgttaccgaggcctgggtcattttcttcatcaatcagctcttcgagatttaaccccatcgcttccagtgcgccctgtacatcttcgtaaattcctagcgacaacatggcgttggagagcgtacggccaatcaaaaactccatcgacaggtagtaaacctgacgagtttcttgcgacaactgggcacggtttgaacgtaaccagcgctccacgagacgatcgcgcacagcaaataacgttgcgttcagccattcatgtttattggcgacgaccgggtcctttccaatcgtaaacatcagcttgtaagcgatagagtgcttaagagcttctacgctaagcgtgggcgatgaatatgtaaacggagcattcatataggcgtttcctgaaaactatttcaagcgatagtaaagctcacggtacgacttcgccgcgacctgccagctaaaatccattgccatagcctgacgttgcacaaaccgccacagtgaaggacgggaccacagtacaaaagcacgtcgaatagcccgtaacagcgaccaggcattactatcttcaaagacaaacccactggcgacgccatctgcaaggttctcaagagaacagtcagaaaccgtatcagcaagcccaccggtgcgccgcactaacggcagcgtaccgtacttcaatccataaagttgcgttaagccgcacggttcaaaacggctgggcaccagaatgacgtccgcgccgcccataatgcgatgcgaaaatgcttcgtgatagccaatctgaacgcccacctgaccggggtattccgctgccgccgcaaggaaaccttcctgcagcaccggatcgcccgcgccgagtagcgccagctgcccgccctgctccagaagacccggtaaggcttccagcaccaggtcgagacctttctggctggtcagacggctcaccactgcaaaaagcggcactttatcgtcaaccttaagccccattgcgatttgtaactggcgcttattttccgctttatcttccaacgtatcgcgggtgtaacgcgaggccaacagtaagtccgtctctggactccagattttctcgtccacgccgttcagtacgccggaaagacgcccttcacggtgacgctgttgcaacagaccttccataccgtaggcaaactgcggttcggtgatctcgcgagcgtaggttggactgaccgccgtaatgtgatcggcatagtacagaccggccttcaggaaagagatttgtccgttgaattccagcccatgaatattaaagaatgaccatggcaattggatgtcattcatgtgatgtgcataaaacatgccttgataggccaggttgtgcacagtaaacaccgacttcgccggacgcccgcgcgccgccagatacgcaggcgcaaggcctgcatgccagtcgtgcgcatgcaccacatcaggacgccagaatgggtcaagcccgctggccatttctgccccaacccaccccagcagcgcaaaacgcaatacgttgtcggtataggcaaataagttggtatcgtgatacgggcttcccggacgatcatagagatgcggcgcgtcaatcaggtaaatgccaaccccgttgtaatgaccgaacaacagcgtgatatgtccggcgaaggtatcacgacgggatactacctgcgcatcggtcacgccacggcgaatatcgggaaatgcaggcaacagtacgcgagcgtcaacgccgtctgcgatttgtgctgcgggtaatgccccaataacatcagccagaccgccggttttaagcagcgggaacatctctgaacatacatgtaaaacctgcattatcgctcctgtttatgccctaacttccgtagcatttcgcgcgttaccagcacgatgccttcttctgaacgatagaaacgacgtgcatcttcctctgcgttttcaccaatcaccatgccttccggaataacacaagcacgatcgatgacgcagcggcgcagacggcacgagcgacctacccatacttccggtaacaatacggcggaatcaatgttgcagaatgaattcacgcgaacgcgcgagaacagaacggactgcaccaccaccgaaccggagatcacacaaccgccggaaaccagtgagttaagggtcatcccgtggctaccggagcgatcctgcacgaatttcgctggcggtaatgattcattgtaggtgcgaattggccaattgcgatcgtacatatccagttccggcaccacagaggccagatcgaggttcgctttccagtaagcttccagcgtacccacatcgcgccagtacggctcggcatccgggtcggattgtacgcaagagagcgggaacgggtgcgcataggccagaccggcttcggtgatcttgggaatcaaatctttgccaaagtcgtggctggagttctcatcgcgatcgtcttcttccagcagttcatacagatagtcggcgtcaaagacgtagatacccatactcgccagagatttgctcggatcgttcggcattgacggcgggttagcaggtttttcaacgaattcgataattttatcgttctcatcaaccgccataacgccaaatgcggaggcttcttcaatcggtactggcatacaagcaacggtgcaacgtgcgcctttttcgacgtgatcgataagcatacgcgagtagtcttgcttgtagatatggtcgcccgccaggatcaccacgtattccgctttataacggcggataatgtcgaggttttgggtgaccgcatctgcggtgccgcgataccagttttcccctttcattctctgctgtgctggcagcagatcgacaaactcgttcatttcttcattgaagaatgaccagccgcgctgaatgtgctgcaccagagtgtgggactggtactgggtgatcacgcccatacgacggatcccggagttgatgcagttagacagcgcaaagtcgataatgcggaacttaccgccgaagtgtacggccggttttgctcgcttattggttaaatccttcaggcgggtaccacgtcctcccgccagtatcagggcaacagatttcaatggcagctggcgcgccaacattaagtgatcgttcttctctaaactaaccatgactaactccttttttatcatctctggaacacacacaatccgtgtgcaggtccctgccagacagccgtaatcactgggttatcctctccagcgaatgggggaatggcgtgccactccccagcaggtaaaacaatctctgttacctcaagcgtggcgttaattgcgatcaaaaagcgatccgagagcagaatttgcagctgtttcggcccgttttgccactcatccgtgcttaaaggttgagcatatcgatttagccaacggacattgccgtcgccttcttcccaccagcgattctccaccaaagcgggaatgcgcttgcgcagatggattaacgcggcggtaaatgcggttaaaccactgcttgcctgcgaccagtccaaccaggttaattggttatcctgacagtaggcattgttattgccatgctggctgtgaccatgttcgtcaccggccagtaacatcggcgtaccctgggagagcaacaacgttgttaacagggcgtgaatgctgtcgcgccgccgttcaaccaggtcaagagaaccgcctaacccttctttaccatgattgttactgtaattgttgttggtcccgtcgcgattttcttctccgtttgcttcattgtgtttatggttgaagcaaacgcagtcgcgaagcgtaaaaccgtcatgcgcggtgacgagattaatcgcggcactcggcagacgaccattacgtttaaaaacatcgctggaggcagcaaaacgcccggcaaacgcccccagaggcaaatcataatgtagccagaaacgacgggcagcatcgcggaaatgatcgttccactcggcaaacagcggcgggaaatttcccacctgataaccaccaggagcgatatcccacggttcagcaattaacttcacctgcgagagcaccgggcagttctggatagcggtaaacaacggcgcatcctgacggaactctggcgtacggcccatgactgccgccagatcaaagcggaaaccatcgacgtggcaggtttctacccaataacgcaggcaggcgctggcataatccaccaccgccggatgactcaaattgagcgtgttgccgcaaccggtccagttgtgataatcgccgtcttctcttatccaataatagctacggttatcgatcccacgcagcgagaataacgggccgtcgaggtccagttccgcactatggttgagcacgatatcaagaatgacttcgatacccgctttatgcagtgctttgattgcatcgcgaaactcatccagcgccgtttctggcgagcaggcatacgccggatgcagcgcaaacatcgccaccgggttgtaaccccagtagttacttagccccatgcgttgcagacgtggttcactggcaaactgcgccactggcagcagttccagcgcggtaatgcccaattgtttcaaatagttgatcatcaccggatgcccgagggctttataagtgccacggatctcgaccgggatctccgggtgcaagtacgttaatcctttgacatgggcttcataaatgatggtgctgccccacggcgtgcgcggcggggcatcatcttcccagtcatagtgatcaaccaccactacgcatttcggcgcaatggcggcgttgtcgcgatagtcaggttcattatgaccggcgtgcagcagcgggttatctttaaactccccgtcaatttgccgcgcgcaaggatcaatcaacaacttcgccgggttaaagcgatgcccctcggcgggttgccaggggccatgaacgcgataaccataacgcaaacccgggcgcgcatccggcagataaccgtgccaaatgtcgccactgtgccctggcaagtcatagcgatgttcctggccattggcgtcaaagacacacagttctacccgctcggcatgagcggagaaaagtgtgaagttgacgccctgaccgtcgtaatgcgcgccgaggggagcgggtttgccaatggcgagttgtgtcattctgcctcccgaaccagccagatagtggccagcggtggtagcgtcaggcttagtgaatgctgacgaccgtggctggcaatctcatcgctgtgtaccgtgccgccattgcctgcattactgccgtgatagtgcatggaatcggtattgaggatttcacgccatttgcccggctggtttatgccgaagcgataatcatgacgcggtaccggcgtaaagttactggcaacgatgatttcgttaccctctttatcgcgacgcacaaagatcagcaccgagcgttctttgtcatccaccaccagccattcaaagccgtacgggtcaaaatccagttcatgcattgctttatggtggcggtaggtgaggttcagatcgcgcaccagacgctggacaccgtggtgccagttatcgccgccttccaacagatgccagtcgaggctggcgtcatggttccactcgcggccctgggcaaattcgttacccatgaacagtagtttcttgcccgggaatgcccacatccagccatagtaggcgcgcaggttcgcgaatttctgccatgcgtcgcccggcatgcggtcgagaatcgattttttaccgtggaccacttcatcatgcgacaacggcaggacgaagttttcagtgtagttgtagagaatcccgaaggtcagtttatcgtgatgatactgacgataaaccgggtcgagcttcatgtagtccagggtgtcatgcatccagccgaggttccacttgtaccagaagcccagaccgcccatatcctgcggacgagaaacgccagggaaatcggtagactcctcagccattgtcaccgcaccggaaacctgctcaccaagaatacggttggtattacgcaagaattcaatcgcttcaagattctcgcgcccgccaaattcgttcgggatccactccccctctttacggctgtagtcgcgataaatcattgacgccaccgcatcgacgcgcagcgcatcaataccaaaacgttcaatccagtaaagcgcgttaccgacgaggaagttactgacttcacggcgaccatagttgtagatcagcgtgttccagtcctgatgatagccttcacgcggatcgctgtgttcatacaagttcgtgccatcaaattcggcaagcgcaaagtcatcagtcgggaagtggcctggcacccagtcgagaatcacgttcagaccagctgcgtgtgcggcatcaatgaaataacggaagtcgtcgcgagtaccaaaacggcgggttggcgcatacaggccggttggctgataaccccaactgccatcgaagggatgctcgttaatgggcagtagttcgaggtgggtaaagcccatccatttagcataaggcaccagttgatcggccagctcgcggtagctcaaccagaaattgttgtcggtgtggcgacgccaggaacccaggtgaacttcataaatagagattggcgcatcaaactgattcgcttttttgcgctcttcagtctgtacaaccttttccggcagcccgcaaataagagacgcggtttccgggcgcatttgcgcttcaaaggcataagggtcggacttcagacgcaagttgccattggcatcaatcatctcgtatttatagagctgaccgttatgcgccccagggataaacagttcccagatgccgctctctttacgcaggcgcatcgggtgacggcgaccgtcccagtagttgaattgcccaaccaccgagacccgacgggcgtttggagcccagacagagaaacgcgtacctgtgacgccatccatagtatctgcatgcgcgcctaaggtttcatacgggcgcaggtgagtaccttcagataatagccaggcatccatttcctggattagcggaccaaaacggtaaggatcatcaatcaggttttgctgaccatgccagacaacagccaactgatagcggaaaaaattcttacgtcgcggaatgacgccgctaaagaatccccgtgagtcgagacactccagttttgcgagtttgcgcccggttttcggttcaatcacccacacatcggtagcgtcgggtaaaagggcacggacttccagtcccgcggtggttttatgcattcccagtacggaaaaaggatccgcaaaatggcctgcaattagcgcgttaatcacgtctctatcgatacgatcggacatgcttgtcttcctgttttattgtgtcaccccatccaattggatttttgacttctggttgtgacatttttttgacctgaacggcgcagcactctgtgcatcctctctgcgtcgtcctcacttcaggtaaggctgtgaatactcatgtattcagccacccttaaagaatagccaatgctctatttaactcccggtaaatcatgaaacatctgcgcttactcctgtattacgcactaacaggggcggcatcgcgccccagatttaatgaataaagattacgccagttgacgaagcatccgacgcagcggctccgcggccccccacagcagctggtcgcccacggtaaaggctgacaggaactctggtcccatattcagcttacgcaggcggcctaccggcgtggtcagcgtgccggtaacggcagctggggttagctcacgcatagtgatttcccgatcgttcggaacgactttcgcccacggattgtgcgcagccagcagttcttccacggtcggaatagacacatcttttttcaatttaatagtgaatgcctggctgtggcagcgcaatgccccgacacgcacacataaaccatctaccggaattacggaagatgtgttgaggatcttgttggtttccgcctgccctttccactcttcgcggctctgaccgttatcgagctgtttgtcgatccacggaatcaggctacccgccagcggcacgccaaagttatccaccggcagctcaccgctacgggttaaggttgtgactttgcgttcgatatcgagaatagcagaggacggggtcgcgagttcatctgccacatggccatacagatggcccatctgggttaataactcacgcatatgtcgcgcaccaccgccggaagcggcctggtaggttgcaacggacacccaatcaacaagatcattggcgaataaaccacccaacgacatcaacatcaggcttacggtacagttaccgccaacaaaagtcctgatgccattatttaatccgtcggtaatgacgtcctgattgacggggtcaagaatgatgatggcgtcatctttcatgcgcagagacgatgctgcgtcaatccagtaaccttgccatccgctttcacgaagctttggatagatttcgttggtataatcgccgccctgacaggtcacaatgatatcgagggcctttagcgcctccagatcaaaggcatcctgaagtgtgccagtggttccgccaaaagacggcgcagcctggccaagctgagaagtagaaaagaagacagggcgaatggcgtcgaagtcgcgctcttcaaccatgcgttgcatgagaacggagccgaccataccgcgccagccgataaaaccaacatttttcataagcgtttttttcctgcaaagatgtgtgctgtataaatgtgccggtctcctcttggcacatctttcaccatacaaaaagcagccaaagtcgcaagtgaaattaatcaatgatagcgaagccatcagtaatgcgacttatcctgctttgttagcacgcagaaagtccgcggcaattatcagggaatttgagttatgaatgaaatcatttctgcagcagttttattgatcctgattatggatccgctcggaaacctacctattttcatgtccgtactgaaacatactgaaccgaaaagacggcgggcaatcatggtgcgagagttgcttattgctctcctggtgatgctggtgttcctgtttgcgggtgagaaaattctggcatttcttagcctacgagcagaaaccgtctccatttctggcggcatcattctgtttctgatcgccattaaaatgattttccccagcgcttcaggaaatagcagcgggcttccggcaggtgaagagccatttatcgtgccgttggcaattccgttagtcgccgggccgactattctcgccacgctgatgttgttgtctcatcagtacccgaatcagatggggcatctggtgattgctctgctgctggcctggggcggcacctttgtcatcctgctacagtcttcgctatttttacgtctgctgggcgagaaaggggtgaacgcacttgaacgcctgatgggattgattctggtgatgatggcaacccagatgttcctcgacggcattcgaatgtggatgaaggggtaacgaggagagtttttcgaaaagaacccggtagcgtcacaactaccgggcgaacaaacttaactcaacagctggaacgcaatcatcccaacgatggcaccgacagtgccgaggatggtttccatcatggtccaggttttcagcgtttcggcttcggtcgcgccggtaaatttaccgaacaaccagaaaccggcgtcgttaacgtggctgacaacaatcgaaccaccagcgatacaaatcgacagcgccgccatttgcgcaccggagtagttcagttgttcaataaccggcatcaccagtcctaccgccgttaaacaggctacggtggcagaaccctgaatgatgcgcactgcagctgccagcacgaagcaggtgatagcaatcggcaggcccatgccggttaacgcttcgcccagtgccggacctacgccagagtcaaccagcacctgtttgaacacgccgcccgcaccaatcaccagcagaatgatccccgccggttgcagcgcgtgaccgcaaatctccatcactttgtcttttggcatgccctgacgcattgccagaccgtaaatcgccaccagacaagcaaccagaatcgcggtaaacggatgaccgataaactcaaaccattcgtaagcagttgatccttccggcacaaaacgcgcggcaatggttttcagccctaccagcaccagcggcagcaggatcagcgacaggctgaatccgaaagatggcattttgccttcgccgagatgcggttcgctgatgtcgtcaggaatatgcagctcaacgtaacggctgatgaagttaccccacagcggcccggcaataatcattcccggaattgccgcacacaggccaatcaggatcatccagccaaagtcggcattcatctgcgatgccagcagcatcggcgctggtccaggcaccagaaatgccgccgctgccgccacgcctgcaaataatgggattaccagcttcaccaggttcgtaccggtgtggcgcgccattgagaaagcaacgctaatcagcagaactatcgccacttcaaagaacagcggtagcgcacagaccagccccgcaaggccgatggcataatgcgcgcggctgtgaccgaaggatttgagcattttgacggcaatctgatcgactgcgccggtttcatgtaagatcttgccaaacatagctcccagggcgacaaccaccgccaggaagccgagggtgcctcccatccctttttccatcgtcgctgcgattttatcgagcggcataccagaaaaaaggccagcccccatggacaccaccattaaagccaggaaagcgtgcatacgcgccttcatgactaaaaacagcagcagtaaaacagaccctactgctgttaaaacaagcgttaatgtagtcactacttatttgccttttttaataacctcaatggtgcttgccacaacaccttccagcggttgatcgatatccaccaccagtacatcggtttcgtccgcacccggctcctgcagcgtttcaaactgcgtcaccaacatttgggttttaaagaaatggcctttgcgcgctttcaggcggctttcaatcacatcaaaatcgcctttcaaatagatgaaagagagattcggattaccttcacgcagcaagtcgcgatagtgttttttcaatgcagaacagacgatcagcgacactttattagtgcgctgcatagcaaacgcggcgtcgttcagcgcctgcaaccacggtttgcgatcgtcgtcattcagtggttcgccagacgccattttttcgatattgcgccgtggatggaggaaatcgccatcaagaaacgcggcatgaagttgatgcgccacttcactggcgaccgcagatttgccgctgcccgatacgcccatcaagacgtaaatgtggtgatcatggttagtcgtgctcaaagtggtgcccccacaatacaagaattaaaaatgttacgggtaactgttatcggtaacattgtccagccggacaatatcagaagcaatatccatccatgccttaagtgtataagtgtgagctacttcaaatttgtgggcttaaatagatccgcccggtgacaaggtgaaacctaaatctaacattttcggtgtcacagattcgccacgaatacgcgccagcaggcgttcagcgccaatactgcccatccgctcacgcggcgtcagcacgctcgcaagtcgtggctccatcacctgaccaatgtcatgaccgtggaaaccggcaatcgccatatcgtcaggaacttttaaccccagacgctgacattcaaacgccgcgccgaccgccaggtcatcattcgtacagaacacgccatccagctgcggatattcccgccgcgcctggcgaatcagttcaataccggaagagtaagaagaagattgctcaaccatcacgctatatggcaccaggcctgcatccagcatcgcctgttcgtatcccttctgtttgatgatagtacgttcgtcgagacgtgcgccgagataggcaatgtggcgatgcccgcgagcaataatggcagtggtcatctggcgtgctgcttcaaagttatcaaaaccgacggcgatatcaaggcatggcgacttgctgtccatcagttccaccacgggaatacccgccacttcaatcatctttaaggtgcgcggcgtgtgggtacgttcggtgaggatcaggccgtcgatattccaggagagcatggattcgaggcgttcttgctccatttccggtttataaccgtagtgcgccagcatggtctgataaccgtgcgcgtcggtgacgctttcgattccgcgtaatacttccgcgaaaacctggttggtgagagaaggtaacaggacgccaatcgcccggctggtggcgttagagaggatatcgggcgcacgattgggaatatagcccagttcatcaagagccgcggcaatcttgccgcgtagagcgacggaaacctgctccgggttgcgtaaaaaacggctgaccgtcattttggtcacgcctacacggtcagccacatcctgaagtacgggtcttttctttttcatcgtcctgaaggtacaaaagagatagattctcttagtttaacacggacacatcagaaccttcccggggaaaacagtgcttgtttacaattattagatatacactaaatcaattgcatcgcattgtgctaacgacgcggcaaaaccccggaagcgtacatcagcacgcgaccggagcgagcgaggaagcctgcaaaaaggcaggcttcaaagatgccgttgagttttaaaccggcggcagatcgaacagtaacacttcgctgtcgctatccgcatggatggagattgcctgctcatcccagattgccagaccatcgctggtcgaggctttcacgccgttaatggtgacattgcctttcaccacctggatccagacgcggcgttcagcggcaatctgatgcaccgactgctcatctttcagcaacgcccagcggtacagttccatatcctgatgcactttcaatgaaccatctcgcgcatccggcgagagcaccagctgtttgccctgtacggcatcgaagcgacgctgttcataacgcggcgtaataccgttttcttcaggcatgatccagatctgatacagatgcagacgctcggtgctgcttgggttgtactctgagtgacgaatacccgtaccagcactcataatctggaactcacccgccggaacctgctctttattgcccatgctgtcctgatgctcaacagtaccttccagcacgtaggtcaaaatttccatatctttatgcgggtgagtgccgaagccctgccctgcttcaatcacgtcgtcgttaatcacgcgcagcgcggagaagcccataaagttcggatcgtaatagttggcaaaagagaaagtatgccaggagtccagccagccatgatttgcatgaccacgttcatttgctttgcgtaagtagatcatttgtattcgccccctgaatgatttcgatgggcttagtgtggacccgatctgcctgggatgatagagggtgaaaattgacccctctgttcaaaaaaattgaactattcgaggggccatcaaacttacttagcgagagttactgtggagggagaggcttgctcaaatccgcgttcaaggatttccagattggtaagaacttcagattccttgacgtaatttggcgcaccgtgggtgatggtttgatacaacgcatcataaacgcgcccgtaatcgcccatctccggcttcatctcttctctgaccgtcacgccctcgtcattgacatactccagcacaccgaccgaatcatccgctgcgaatcccggttcgcccggcataatattagccttcaggctggtttcctgctggtcgataccgtatttaataaacgaacctttcttaccgtgaacgataaatttcggataatcgattttcaccagatggctggttttgacgatggctttcaggtcgccataaaacagttgcgcttcaaaggtgtcgtcaggattggctttattacgcaggctgcggatgtcataagcgacgtgatccgggcgaccgaacagagaaataatctggtccatcgtatgcacaccaaggccataaaacgcgccatcctgcggcagcccaggtttggtttctgccaccgggcggtaatagtcaaaatggctttccacttcaacaatctctcccaacttgccactttcaatcgcttttttcgctgtcaggaagcaggagtcaaagcgacgattctgatacggcgtgacggtcagccctttgcttttcgccaacgcaaacagctctttcgcctgcgcaagtgtcggagtgaacggtttttcgaccagcacatttttcccggcttccagcgcgcgtttcgcgtactcgaaatggctgtccgcgtgggtgcagacaacaaccagcttaacatcgggatcgtttagtacttcgtcgagatcgctggtgaaatggatatgggaataaatgggagcctgttcttccggcttcgcatggcgacgaaaaatatgcgcgacatgccagctatccttgcggttaagtacatacggcagatggtaacgggtggtgcttttgccgaagccaataaaggcgcagttgatgaccatgatttcgtcctttttaaggtggttatttacaccttagcgcaaagcggacgtggttcctactggagtgcgcataacgaacacaagcactcccgtggataaattgagaacgaaagatcaaaaaaaaagccagcacccggctggctaagtaatactggaagcaatgtgagcaatgtcgtgctttcaggttctccgcgagggtcttcctgatcgcgagacaataataatcattctcattcgcacttgtccaacactttttgcaaaaaaatgcatttgactcgcatttgaaagtcaatgatgttgaaagggacatttaccccaaagaggacaaaggaatgagtgagatagtaatacgccacgcagaaacacgggattacgaggccatcaggcagattcacgcccagccggaggtgtattgcaacacactacaggtgcctcatccttccgatcatatgtggcaggagcgactcgccgatcgtcccggcatcaagcaactcgtcgcctgtattgatggagacgtcgtgggccatctcaccattgacgtgcaacagcgcccacgccgcagtcatgttgccgattttggtatctgtgtcgactctcgttggaagaaccgcggcgtcgccagcgccctgatgcgagagatgattgaaatgtgcgacaactggttgcgggtagatcgcattgaactaaccgtgtttgtcgataacgccccggcaattaaggtctataaaaaatacggctttgaaattgaagggactggtaagaagtacgcattgcgtaatggtgaatatgtcgatgcatattatatggcgcgggtgaagtaagatagtgccctttttctgagatggaaaaagggtgtcattcaaaatcgacataccttcctttaaggtatttatttgcccaatacatatattgagatttaactcataattacttcctaaagtgtaatattttattttttaatatatacgcctacaatttcctggagtaaataaataacaattaacaagcataatattgccattgataaaatagcatgccataaaaggacttttcagggatgagtaatattgtttacctgacagtaacgggagaacaacaaggaagcatctccgcaggttgtgggacttctgagtctacaggtaatcgttggcagagcgggcatgaggatgaaatatttacattctcactcttaaataatattaataatacggggcttggttcacagttccatggtataacattttgtaaattaattgataaaagcactccattatttattaattccattaacaataatgaacaattatttatgggatttgacttctatcgaataaatagatttggtagattggaaaagtattattatatacaactaagaggcgcttttttatcggctattcatcaccagatcattgaaaaccaactggatacagaaacaataactattagttatgaatttatcctctgtcaacatcttatcgcaaataccgagttcagctatttggcactccctgaaaattataaccgtttgtttttaccaaattcaaaaaaccaaacaaataatcgtttcaaaacgttaaacagcaaagctattggcaggctacttgctgctggtggcgtatacaatgggaacattgaaggattcagagatactgcggaaaaactgggtggagatgcaataaaaggctatgatcaaatactaaatgaaaaaacagcgggcatagcgatagcaacagcatctattcttttaacaaagcgttctaatgttgatacatatacagaaataaatagttacttaggcaaacttagaggtcaacaaaaacttcttgatggtatagacataatagaaataatatacattaagagaccttcaaaagacttagctaacttacgaaaggagtttaataaaactgtaagaaaaaattttcttatcaaacttgcaaaaacctccgaagcatctggaagattcaacgccgaagaccttttaagaatgagaaagggcaatgttcctctaaattataatgttcaccataaactatctctagatgatggtggtactaatgatttcgaaaatttagtattaatcgaaaacgaaccatatcataaagtttttactaacatgcaatcacgaatagctaagggaatattagtaggtgaaagcaaaatcactccctgggccattccatctggctcaatttatcctcccatgaaaaatattatggaccacacaaaatgatgactaaaacccaaataaataaattaataaaaatgatgaatgatttagactatccatttgaagcaccgctcaaggaatcatttattgaaagtataatccaaatagaatttaattctaattcaactaattgcctggagaagttatgtaatgaagttagtattctttttaagaatcaacctgattatcttacttttttaagagcaatggatggattcgaagttaatggattacgattatttagcctctcgattccagaaccttcagttaaaaacctttttgccgtaaatgaattttatagaaataatgatgatttcataaaccctgatctacaagaacggttagtgatcggggattatagcatttcaatatttacttatgacattaaaggtgatgctgccaacttactgatttagtgtatgatggtgtttttgaggtgctccagtggcttctgtttctatcagctgtccctcctgttcagctactgacggggtggtgcgtaacggcaaaagcaccgccggacatcagcgctatctctgctctcactgccgtaaaacatggcaactgcagttcacttacaccgcttctcaacccggtacgcaccagaaaatcattgatatggccatgaatggcgttggatgccgggcaacagcccgcattatgggcgttggcctcaacacgattttacgtcacttaaaaaactcaggccgcagtcggtaacctcgcgcatacagccgggcagtgacgtcatcgtctgcgcggaaatggacgaacagtggggctatgtcggggctaaatcgcgccagcgctggctgttttacgcgtatgacagtctccggaagacggttgttgcgcacgtattcggtgaacgcactatggcgacgctggggcgtcttatgagcctgctgtcaccctttgacgtggtgatatggatgacggatggctggccgctgtatgaatcccgcctgaagggaaagctgcacgtaatcagcaagcgatatacgcagcgaattgagcggcataacctgaatctgaggcagcacctggcacggctgggacggaagtcgctgtcgttctcaaaatcggtggagctgcatgacaaagtcatcgggcattatctgaacataaaacactatcaataagttggagtcattaccgacattaaaagtaacttttttgaaattagagataatattggcacagaaaatatattcagttcgtttagtgatttctcttcattcttaaacgaaatcatggacagttgttcataataatcaaaaggaaacaaaaatcattgtaaaccatgccatctttttagagattaccagcagaaaattccttgttcgaaatttagcagtgcaagctatggaaaaacttacaacggaactacactccttaagtgagatggaccgaagacatgtagtctctattttagccgaaatagctaatggctatgatgattttaatgacatgttgatttatttagaattttacccgaatcataagattctgatatcttaaataagaaaatcccgttcgacgttctgaaaaagaaatcataaaatattagcagatacttatttcgtgactatatcttatccgatgaacttttttcaaaaccagcatttaataatatctttgacgaagatgaacgcgtctttgctcaatgtatcacacaggaataataatataacactcaacaataatatttattataattatgattacttatcacgacgcattcgcgaaagcgaaccattaccttgatgatgcagatctcccggtcgtcattactctacatggacgctttagccagggctggtatttctgtttcgaagcacgagaatttctcgaaactggagatgaggccgcgcgcttagctggtaacgcaccttttattattgataaagacagtggtgaaattcattctctgggaacggcaaaaccgctggaagaatatctacaggattacgaaataaaaaaggctaccttcggcttgccctgacaaaatagccctcttcccacgaagagggccgctaaccttagtaccccgccgttaaatcatccaccgagcgcgggtcggatgcgccgtacaactcaccgtccggcccaaccataatgctttgtgtactgcccatcgcctctttcagcgccactttctgaccttttgcttccagcagcttgagcgtatccgggctaaaccctttttcgacacgcagctcgtccggcaaccactgatggtggaaacgcggcgcattggtcgcttcggcgacgttcaagccataatcgatgctattcaccaccatttgcagcactgtagtgatgatccggctaccgcctgggctaccggtaaccagccaggttttaccgtctttcaccacaatggtcggcgacatcgacgacagcgggcgtttgttcggcccgacggcgttggcatcaccgcccaccagcccgtaaacgttcggtacgcccggtttggcggagaaatcatccatctggttattaagcagaataccgctctcgcccgcgacaatgcccgtaccgaaggtggtgttcagcgtataggtcaccgccaccgcgttaccatctttatccaccactgagtaatgggtagtttgattactctcataaggcgcaagcttgccggggcgaatttcgctggatggcttcgctttattgatatcaatttgatcggcaatagatttggcataggctttattggtcagcgcctgccacggtactttgacaaaatccgggtcgccaagatattccgagcggtcggcgtaggcgtatttctccgcttctgccatgatttgcatcgcatcggcgctgccaaagccgtatttcttcatatcgaagttttccagaatattgaggatttgtacgatatggatcccgccggaggatggcggtggcatggagtaaacctgatacccgcgataatcgccgcttatcggagtgcgttcgaccgctttataggctgctaaatcttctttagtgatcaagccaccgtttttctgcatctcctgggcgatctgttccgcaatcgtgcctttatagaattcgtccgggccgttttcagcaatcatctccaggctctttgccaggttcgcctgcaccagcgtgtcgccctttttcagcggctcgccctctttccagaagatagctttactgttttcgtgattcggcaacacttcgctaccgtaggttttgagatcgtcagccagcgcgtcgttaacgataaaaccatcgcgtgccagtttaaacgcgggctgcacgactttgttcagcggcatggtgccgtatttatccagcgccagcgagaaacctgctaccgtacccggtgtgccggaagccagatgcgaagtgagtgattttttgctgtccgggttgccctgatcatcgaggaacatatcgcgggtcgctttggcgggtgccatttcgcggaaatcgatagccgtggtattgccatttttcgagcggattaacataaaaccaccaccgcccagattccctgcctgcggatgcgttaccgccagcgcgtagcccaccgccacggcggcatcaacggcattcccgccctccttgagaatatccacccccacctgagtggcagtggcgtccacagacgctaccattccctgtttcgcgcgtaccgggtggaagacatcttcctccacaccatacgagacgggcggcgcaggaggcgcggcggcggcgctaaaacaacttcctgagagcagagcagcaatggccacccggcgtaaaaacgtcggttttatcatcgttattctccagagattaaggggcaaccccagctaagcctggtatataactctgaattaatcatcgttttgtcgggaagcgagtaaacttaaaggatatcttcagaggaggatacgcgatgaaacgacttctgattcttacggcactcctgccgtttgtcggctttgcacagcccattaatactctgaacaaccctaaccagccggggtatcagatacccagccagcagcggatgcaaacccagatgcagactcagcaaatccagcaaaaagggatgctgaatcagcaactgaaaacgcaaactcagttgcaacagcagcatttagaaaaccagataaacaataattctcagcgggtgttgcagtcacagccgggggagcgaaatcccgcccggcagcaaatgctgcccaacaccaacggcgggatgttaaacagcaaccgtaatccggatagttcgttgaatcagcagcatatgctgccggagaggagaaacggcgacatgctgaatcagcccagcacgccgcagcctgacattccgttgaaaactattgggccgtaaagttcggaccaatcacgtcaatcgcatcggtacagatgcaatccacaccccagcgcagcaactctgctgcgcgctggggtttattgacggtataaaccagaatccgcagtccggcgtctttcaactgcatcactcgcgctttattgagtaacttatgattgagatgaatagagacgcagcccagccgcgcggtcagttcgcgccagtcgtcgcgccactcatccagcaacaaaccgcgcggcagttccggtgccgcctgttgtgcagcttctaaagcatcaatctcaaacgatgacagcagcggcggcgtcataccggcccacagctcgcgtgccgccagcgccaccattttgcccgttaatggcccggtgccggtggtgggtttgatttcgatattcgccatcatcccgtgttcgcggcaacgttccgccacctgcgaaagcaacggtagcggctcacctttaaacattttgctgtaccaactgcccgcatccacgcgcagtaaatcctgccagttcagttcacccgcgacgccccagccgttgctggtacgttcgagattgtcgtcatggagcaggaagatctcgccatctttcgataacttcgcgtcaaattcgatcatcttatgaccgtattttgccccgacgtcgattgacgccagggtgttttccggggccagcttaccgccgccacgatgagcgacgatgcggggataaggccagttactcatactcgttgtcctgtttcaccatcaaaaagatgcagctgattttccgccagatgcagccacagcgtgctgcctgccgtcgggcgctcctgatgcgccagtcgcaccaccagcttctgctcgccccagcgtccgtgcgccaggttatctgcgccgaggatctccagcgtgtccatcaccatcggtacgccgccttctgcctgcgagcttagcgcaatatgttccgggcgaatgccgagagtcattttacgcccggcatactgacggtagccaccgtttagcggcagctcaataccgccgtccagttcgaaatgcgtgccttcgttattcacgcggcctgtcagcaggttcatcgccggactgccgataaaactcgctacaaacaggctggcgggcttttcgtagacttcaactggtgtgccaatctgttcggcaacaccgccgttcatcaccattactcgctgggcgagcgtcatcgcttcaacctgatcgtgagtaacgtagagtgaagtcgttttcaggcgacggtgcaactgttgcagttcaagacgcatctgcacgcgcagcttggcatcgaggttagagagcggctcatcaaacaggaacaccgccggatcgcgcacaatcgcgcggcccatcgccacacgctggcgctgaccgccggaaagctcgcgcgggcgacgtttgagcagaccgtccagctccagaatgcgcgccgcttctttaacgcgctcggcaatttgctgcttgcccatgccgcgaattttcagcccccacgccatgttttcttcgacactcatatgcggataaagcgcgtagttctggaacaccatcgcaatcccgcgatcttttggctccatttcagtcacgcgctggtcgttgatccagatatcgccttctgtcacccgctccagcccggcaaccatgcgcagcagcgtcgatttcccgcagccagacggcccgaccatcacgataaattcgccatccgccacatcaagggtcagcggtttaatgacctgggttttaccatcccagcttttggttactgcctgtaatttcagtcctgccatcttatttctcactatcgaccaggccgcgcacgaaggcacgctgcatcactaaaacaatcaccaccggagggataagcgttaacaacatcgccaccatcactgagttccattccgtggtgccttcgcctgtagcgatcatccctttgatccctgccacggtggtgccgagatccacatcggtaataatcaacaacggccacaaatactgattccagccgtagataaaggtgatcacaaacagcgccgccagattagttttggagagcggaaaaacgatgtcgcaaaagaagcgcattggcgatgcgccgtcgatccgcgcggcttccaccagctcatccggcagcgtcataaagaactggcggaacaggaaagtagcggtcgccgaggccatcagcggcagcgttaaaccggcgtagctgtcgagcatctgcaggttggcgatgacttccaccgtcgggaagatacgtacttcaaccggcagcatcagggtgataaaaatcatccagaagaagaggttacgtagcggaaaacgaaaccagacaatggcaaatgccgagagcatcgagacggtaattttgccgagcgtaatgctgaacgccatcacaaagctgttaagcaacatccgccagaacggcgcgctattcgtgcctaccccgttcacccagatgttgtggatgttttccagcagatgtgtgccggggatgagcgtcatcggcgcggcatagacggcctgtttatccagcgtcgccgcgacaaacgccacgtacagcgggaagaggatcaccgcgatcccgaggatcagcatggtatggctgaatatcgtcagccacggacggttctcaatcattggtaacgcaccttgctttcaacatagcggaactgcaccaccgtcagcacgatgacgaggaacatcaacaccaccgactgtgcggcagacgaagccagatccagtccggtaaaaccttcgcggtagatcttataaatcagcgtcgtggtggcctgaaccggcccgccggacgtggcggcgtcgatcaccgggaaggtgtcgaagaaggcatacaccaggttcactaccagcaggaagaaactcaccggggcgataagcggcagcgcaatcttaaagaagcggcgaatcggccctgcaccgtcgatggctgcggcttcgatcaacgaacggggaatggattgcagcgcggcatagaagaacaggaagttgtagctgatttgcttccatactgaggcaaacaccaccagaaacattgcctgaccgctgttttgcgcgtggttccagtcgtagccgaactccgcgagaaaatgggtgatcagcccgcgaccggggttaaacaggaagatccacaatacggcggcaacggcgggagccacggcgtaaggcagcaacattaaggtttgatagaaacggctgccgcgcacgatgtactccaccagcgccgcaaagaacagcgataccagcaaaccgctgacggtgacaaaggtgctgaattttatcgtcgtccagaaggagtcgagatagtagctgtcatggaacagcgtgacgaagttatccaggccgacaaactggctggagaaaccaaacggatcgacgctttgtagcgagtaccacaacgcttcgcccgcaggccagataaaaaagataacggtgatgatgagctgcggcgcgaccagcagataaggcagccagcgcgagcggaacaccggacgggatgatgacattacggttaattcctgaactgtgccggatgcgcttcgcttatccggcctacacgcgatgccaggtcagataagcgaaacgcatccgacattacactgattaagacttcgtcgatttctcaaagcggcgcagcaactgatttccacgctcaacggcggtatccagtgcctgctgtggtgtcttcttaccggtccacacgctctccagctcttcatccacaatcacgcggatctgcggcatgttgcccagacgcagccctttggtgaacggcaacggcggcttattcagcatctgacgcgtcgcggtatccgcccctgggtttttctcataaaagccctgctcacgggtcaggtcatacgctgctttggtgattggcagataaccggttttctgatgccactcggcagcgttttctggcttcgcgaggaaatcgaggaacttcgccacaccggtatacgtttctttatctttaccctgcatcacccacaggctggctccgccgataatggcgttttgtggcgcatctttcgcatcggcgtcgtaaggcatcatgcctacgccgtagttaaatttggcgtactcgcgaatgttggcaagagaaccggaagaggcggtggtcatcgcgcaatcaccgttatagaacttctcggtggattcatccttacgaccgacgtagctgaagtcgcccttcttgttcatctcctcgagcatggcgatgtgtttcacctgctccggcttattgaactccagcaccgcgtccgtgccgtcaaagccgttgtttttgctggcaaacggcagaccgttccaggcgctaaagttttccagttggatccagccctgccagccgctggcgtagccgcacttcatgccggaggctttcagtttcgcggcatagtccgccagatcctgccaggttttcggcggctgttccgggtctaatcctgctttcttgaaggcgtctttgttgtaatagagaacgggggtcgagctgttgaatggctgggagagtaagtggcccgttttgctgtcggagtagtaacctgaaaccgtcggcacaaactgcgactcatcgaactgaatccctgcctctttaaacacgtcatacaccggtttaatggctttcgacgccatcatggtggcggtgccaacttcataaacctgcaaaatagccggcgcgttgccggtacgaaatgcggcaatccccgcgcttaaattctgttcgtagttgcctttataggtcggtacaattttgtaatccgggttttcggcgttaaaacgttgggccagagaatccacctctttacccagttccccttccatagaatgccagaacggaatggtcgtcactgcctgtgcattccccattaacgccagtccgagcgccagtgctgaagctgtataatgtaacggtttcatcgtttatctctcttgttgtaccgaatgcgcgaattcacgcgttttatgctcgcggggtaacatgacatgctcgaattacagaaaaataacttttttgttacatttgtaagatagtaaggtgtcagaaagatgacaaggcggtgacggcgtgggtgagggaaaatgggagatggggcacggataagcgggaaaatatagaaggtctgaatcaaactctacagattgctcatcgtttcatgccggatgcggcgtaaacgccttatcaggcctacaagatcgtgcaaattcaacatattgccactcacccagtaggcctgataagcgcagcgcatcaggcaattttacatttgtcacctgtctcaaaggagtcttttgactccctatcaatcaacgtgttattacccgcctaaatacgcacttctcaccgcttcattcgccagcagcgcatcaccagtatcggaaagcactacatggccgttttccagcacgtagccgcgatccgccagctttagcgcctggttggcgttctgctcgacgagaaagatagtcatcccctgctcgcgcagctgctcgatggtgtcgaaaatttgctggatgataatcggcgcaagaccgagcgatggctcatcaagcagtagcaaacgcgggttgctcatcagcgcacgaccaatcgccagcatctgctgttcaccgccggacatggtgcccgcccgctgaatacggcgctcatgcagacgtggaaacagctcatacacccactttatgcgctcctggaactggtcgcgttcagcaaaaaaaccgcccatcgccaggttctcttccaccgtcatccgcgagaagacgcgacgcccttccgggacaatcgccaccgcttcgcgcatgattttcgctgtctgccagtcggtaatgtctttatcatcaaacacaattcgcccgctggtggcacgcggatcgccgcataacgtgccgagcaaggtggttttccccgccccgttcgcgccaatcagcgtgacaatctcgccctgattgatatgcaggctcacctcatgcagcgcctggattttgccgtagtgggcgctgactttgtcaaaggacaacatgactttttccatcttatgcctcacctaaataggcacggatcacgtccgggttattacggatctgctccggcgtaccgtttgccagcggcgtcccctgattgaccacgtaaattcggtccgaaattcccatcaccagcttcatatcgtgttcaatcaacaagatagtggtgttgtgatgattgcgcagttcggcaatcagctcatccagctctttcgtctctttcgggttaagacctgccgcaggttcgtcgagcattaaaatctccggctgcgtcaccatgcagcgggcaatctcaagacggcgctggtcaccataggccaggttactcgcctgacggttggcgtgttccagcaaaccaatgcgctcaagccaggtcgcggcgcggtcgagcgcttcgctctgggcgcgacggaaggatggcgttttcaacaggccagagaacagcccggttttcagttgctgatgctgcgccaccagcaggttttcaattaccgtcatttcacggaacagacgcacatgctggaaggtgcgcaccacgcccatgcgggcaatttgctgccccggtaaaccttccaggtgctgatcgcgcagtaaaatggtgccgccggtgggtttgtagaatccggtcagacagttaaaaaccgtggtttttccggcaccgttagggccgattaacgagacgatctcctgcgggtacagttcaagattgacgttgttcaccgccagcaggccgccgaagcgcatcatcaggccgttaacagataataatggctgactcatgcctgctctcctttcgctgcgccgtttttcagcttcagttgcgggcgcgtcatgggcagcaagccctgcggacgccagatcatcatcagcaccatcaaaccaccgagcattaacatgctgtattcgttgaaatcacgcatcaactcgcgcgacaccaccagcaaaattgccgccagaatcaccgcaaattgcgagcccataccgccgagcaccactatcgccagcacaaacgccgattcggcaaaggtgaaggattccgggctgacaaagccctgacgcgccgcaaacagcgttccggcaaaaccggcaaacgcggcacttatggtaaaggcagtcagcttgatacgacgcgggcttaagcccagcgaacggcaggcgatttcatcttcacgcaacgcttcccacgcacgccccagcggcatccgcagcaggcggttaatgacaaacaggcttagcaccaccagcagcaacgccaccaggtagaggaagatgacacgatcggagggatcgtatttcaggccaaagaaattactgaacgtgtcccagccgccttcacgagcggtacggctgaactcgagtccgaagagtgtcggtttcgggatctgactgattccgttcgggccgccggtaatttcggtgttattgagcagcaatatgcgcacaatttcgccgaaaccgagggtaacgatcgccagatagtcaccgcgcaaacgcagcaccggaaaaccgagcaggaagcccgccgccgctgccattaatccagcaatcggcaggcaggtccagaagcccaagccgtaatagtgattgagcagcgcaaaagtgtaagcgccgatggcgtaaaaaccgccgtaccccagcaccagcagaccagaaagaccaacaaccacgttcagcccgagaccgaggataatgtagatcatggtcagggtggcaatatccaccgtcccgcgtgaaaccataaacggccacgccaccgcaagcaccaacagcgccacgaggaacagtttctgcttcaccgtggagccatcaatggcgggcagaataaacttcggtccggaaacgcttttcaaccctttctggaaagccggtcgcaaaagctggaagaaaaagaccaccgccgtgccgataaacacccactgccaacggacatccgaagccgtgtcgaccaccagtttggtgccatccagctccagttgcacgcccataaagacgcccgccagcacaaagaacatcgcggcagagagcagcgccattgcaatatgcatcggtttcatactttctctacctccgggcgacccagaataccggtcggcatcaccagcagcaccagaatcagcagggcgaatgagaccacatctttatattccgtactcagataggcagaagagagcgcctccgcaatccccagaatcaggccgccaatcatcgctcccggaatgctgccaatcccaccgagcaccgccgcggtaaaggctttcatcccggccataaagccgatgtaggggttaatgacgccgtagaactgaccgagcagcacacccgccaccgccgccatcgccgcgccaatcacaaaggtcagcgcaatcacccggtcggtgttaatgccaagcagactcgccattttcagatcttccgcgcaggcacgacacgcgcgacccatgcgggaatagcgaatgaaaatcgtcagcgccagcatggcgaggaaggtaacaatccagatcaccgcctgcatggtggtaatagaggcagagaagttttcgctatgccccaccacccactgaccgttaaacaggctcggcagcgccacgtcgcgcgaaccttcggtcaggctgacgtagttttgcaggaagatggacataccgattgcagagatgagtgcaatcaggcgcttagagttacgcaccgggcggtaagccacccgttcgatactccagccgtaggcgctggcaatgacgattgcgccgacgaatcccgcagctaccagcagccagccggtatcaatgcccatcatcatcagcgcggcgatgatcataaatgagacgtagctgccaatcatataaacctcgccgtgggcgaagttgatcatgccgataatgccgtaaaccatggtgtagccgatggctatcagcgcgtaggtactgcccagcgtgacgccgttaaacatctgctgcaagaaatacaaaaactgctcagacataaggtaacctttctaaacccgcccgcattttacgggcggtgggatgatcacttggctgccgtggatgaaccgtcggcgtgccactggaagacaccaaaatcaaatcccttaagatcgcctttttcatcccagttcagcggcccaatcacggtgtttgcaccgttagcttttaaatctttcaccagcgccagcggctcatcgctgccggtacgctcaagggcagtcgccagagattgcaccgccgcgtaggtgatccagacataaggcccggacggatctttcttgtctgctttcagcgcatcaacgatgccctggtttgccggatcctggtcatagcgttttggcatagtgaccaacatgccttcggcggcatcaccggcaatgttcgacaacgacgcattacccacaccttccggccccataaactgggttttcaggccaacggaacgggcctggcgcagcatctgccccatttccgggtagtaaccgccgtagtaaacgaagtcgatgttttcttttttcaggcgggcgatcagcgcggagaaatctttctccccggcggtaataccgtcgaagaagacgacgttggcgttagccgctttcagcccgtcctgcaccgaacgcgccagcccttcgccatactgttgtttgtcgtgaatgatggcgatgcgctggggcttcaccgtctcaagaatgtattttgccgccgttggcccctgggaagagtccagcccggcagtacgcataatgtgttgataaccgcgttgggtcagctccgggttggtcgctcccggcgagatcatcagaataccttcgtcttcatagatatctgacgcaggctgggtagaagaagaacacagatgaccaataacgtatttaatgccgtcattaacgattttgttggcgaccgcaacggcttgtttcgggtcgcatgcgtcgtcatattccacgccaaccagtttatcgcccttaattccccctttggcattaatgtctttaattgcctgacgcgcgccgttaaattccatatcgccccactgggcaatcgggccggacatcgcgccgacaacggcgactttaatatcgtcagccatagcggtgtgtgaaattgccagtgcaatcatccctgcgatgatagttttcgcattccgtttcatagtcaaaaatccccattcgtgatgttgtgttgctttgtttttatgtgttaacaaatcagactgttctttttttatactgcactgtttttgcctgtctgattaaggggttagcgcagtattttgtgataatagcgattaaaatccctatttttcagtcgattaagaacagataatattctgaatttattgatagataaacagaaaaaagtgcctttgtcagcataaaataacggcacaaagggcggaataattcactatcattcaggggattatgctggacatttttcattctctaatgttttaattttgtaattattgctgttaaaaaattaatcacctgccaaaagaaataaaaaagagaaagcctccgattaaattatttcgctacactggttccacttttgtgatttacacgggttacccatgaagctgaccatcattcgattagaaaaatttagcgaccaagaccggattgacctgcaaaagatctggccggagtattccccttcctcgttacaggttgacgataaccaccgtatctacgccgcgcgttttaacgagcgcctgctcgctgccgtgcgggtaaccttaagcggcaccgagggagcactggattccctgcgcgtgcgggaagtcacccgccgtcgcggtgtggggcaatatctgctggaagaggttttgcgtaacaatcctggcgtttcatgctggtggatggcggatgcaggcgtggaagatcgcggtgtgatgacggcgtttatgcaggcgctggggtttacggcacaacagggcggctgggagaagtgttaatcgtcaagtttgatttcaaaagtgatattgcctgatgcgctacgcttatcaggcctacaatgtgtgttgcaatttactgatttctttggatcttgtaggccggataaggcgtttacgccgcatccggcatgaagcaacgtactcgatattagcaatttggcggcaacccaaagttgccgattaatgattacttcgcatcggtcgccgtgccgttggcgtgccagtcaaatacgccgaactcaaagcctttcagatcgcctttctcatcccaggtcagcggtcccattacggtatccacggagttcgctttcaggtatttggcgatttcagccggatcgtcagactgattcaggcccgcctgcaaagattgcagcgcggcgtaggtggtccaaacgaatgcgccacttgggtcctgttttttcgctttgatcgcgtcaacaatgggtttgttcgccggaacctgatcgtagttcttcggcttggtcaccagcagcccttccgctgattcgcccgcaatgttagacagcgaaacgttagccacaccttccggccccataaactgagttttcagccctgccgcgcgtgcctgacgcaggatttgccccatttccgggtgataaccgccgtagtaaacgaagtcgatattctcttttttcagacgcgccaccagcgttgagaaatctttttccccggcggtgatgccatcaaagaacaccacgtttgcattgcctttcttcaggccgtcctgcaccgctcgcgccagaccttcgccgtattgctgtttgtcgtgaacgatagcaatacgctgcggtttcactttctcaagaatatatttcgccgccgtcggcccctggtcggagtccaggccggtggtgcgcaggatcagctgatagccacgggcggtcagctccggcgcggttgccgctggggtgatcattaaaatgccttcgtcttcgtagatgtcagacgcaggctgcgttgatgaagaacagaggtgaccaatcacatatttaatgccgtcgttaacgactttgttcgccaccgcaaccgcctgtttcgggtcacaggcatcgtcatattttacgatttgcagtttgttgcctttaatgccgcctttagcgttgatatccgcaaccgcctgctctgcgccggtaaactcctggtcaccgtactgcgcaaccggaccggacattgcgcccacgaccgcgactttaatatcttctgccagagccatattgctgaatgccagcgcgatacatcctgccagtaacgctttaccctttatgttcatcctgagaatccccattcttctggttattacgtgtgttgtgatgttgtttttcagcactttatttcgttttatgcatgactacccgtgctttagcagcatactctgctaaaacatacccgatttttatgatattggaatagctattttgacagtttattaacaatctgcgtggggattggcgttttgccggaggggaaattgattattacagaggcccaaaaaacaaaaaccccggactctcatccagggttctctgcttaatagcggaaattacgcttcaatggcagcacgcaattttttcatcgcgttcttttccagctggcgtacacgctcagcggaaacgccgtaacggtcagccagttcctgcaacgtggacttgttgtcttcgtccagccagcgcgcacggatgatgtcctggctgcgttcgtccagaccctgcatcgcgtcggtcagacggtttgccgcctgctcttcccagttatcatcttcaatgccgtcggcaaagttagatgatttatcctgcagatagagcaccggagccatcggctggctgtcggaatcgtcgtcggaagacaggtcaaaggtcatgtcctgtgccgccatacgtgattccatctcacgtacgtctttgctggttacgcccagttcacgggccaccatttcgacttcatcctggttaaaccagcccagacgctgcttggttttacgcaggttgaagaacagtttgcgctgcgctttggtggtcgcaactttgacgatacgccagttacgcagaacgtattcgtggatctctgctttgatccagtgaacggcgaaggagaccaggcgcacacccacttccgggttgaaacggcgcactgctttcatcaggccgatgttaccttcctgaatcaaatccgcctgtggcaggccatagcccgcataattacgagcaatatgaacaacaaaccgcaggtgagacaggatcagcgttttagctgcttccagatcgccatggtaatgcagcttttcagccagcgcccgctcctcgtcagccgacaacatcggccacgcgttagctgcccggatgtaggaatccaggttgccaactggggctaaagctaaactttgcattttgtcagtcattcaaatcctctcaatcgatatcttctggcgcttcagtggtagcaacaactgtgccagagcttaagagcaacgaggttatcattcactgttttatcagaccgtgattttatccacaagttcaatgcaagcttgtgaataaattacgcacaaaatgtgacatagagatgaaataccgggaagagacaacggggtctctttccctgctacggaacccattgcagggaaagagtataacacgcttttattattcaggcgtaaagtggcgtaaatgttgtaccgtggcaagccacgctgccacccagccaatcatcgagcataccagcagcaatagcaggcattcatcgaatgataagccattgatatcaaacttcgttccgaaaacctgtgccacttccgcaaccgccgatgacaatcgcagcaccagaatttctgacaaaattaatgacaacaatgcgccagaaaatcccagcagtgcgccaccatacaggaacgggcgcaggatgaatccatctgtcgcaccaatcagtttctgtacgttaatggagtcacggcgagcaaagatactcagacgcacactgttaccgatgacgaggaacacggccgccaccatcaacacgccgatcatcgccgaaacgcgcccgaccagcccggtcaacgccgccagacgggcaaaccagctgtcatccatccgcacttcgtcaatgccgttaatctgcgtgatacgatcacgcagcgtattcagtgattccgtcccctggaaatcgagtttcgggatcaccaccgccactgccggaagcgggttttcttccagcatatccagcgcaccaccaaaaccagaccagttacggaactcacccagtgcgtcttcacgagaaagatagttcactttctccacgccttgctcggcctgcaactgtgccaccacgcccgcagcagcgtcatcgtccagcgttttttgcagataaacagtgatttgcggtgacggataatactgcgtcgccgcctggttaacgtttttgtacaccatataacagacgctgggcagcgtcagagaaatggcgataaccatcaccgttaaaaacgtggcgaacggtttgcttttcagatcctgcaatgcgccgtggaaggcatagcgcacctgttcgttgaaaacgttggttttgcgatttaccggttttggcgaggatttcgcgcgttttggtgcgttacgaccgccgtcgcctgagccgccgaccgatttacggaagcgatcaagacgcccgccaaactgccgaatatgattgattgcatcgcgcttattcatggcccacgcctccatgcaagtgaccatcgctcagggtgagcatgcgataggaacgccgcgagatcaggttgatgtcgtgcgttgccatcaatacggttaccccaacgcggttaaactcttcaaacagacgtaaaatgccttccgacagcgcgtcgtccaggttaccagtcggttcgtccgccagcagtaccgcgggcttgttcaccaccgcgcgggcaatgccaacacgctgttgttcaccgcccgaaagctgaatagggaagttcttcgctttgtccagtagcccgactttatccagcgccgccgacacccggcgacgaatatcgtcaccgctggcaccggcgataatcagcgggatcgccacgttatcgtagacagtacggtccatcagtagatggtgatcctggaaaatcatgccaatctggcggcgcagaaacggaacttcacggtttttcagacgcgtgatgtcatggccgctaaaccagattttcccggcgctgggccgctcaatcccacagatcagcttcaggagggtacttttccctgcgccggaatgaccggtcagaaacgccatctcacccggctgcatatggaacgtaacgccctgcagcgcctgtctcccaccgagataagccttgctgacatgttcaaagcgaatcattgttaatcctctcgggcaaaaagtgcctctataaagtcgtccgccttaaacggacgcaaatcctcaatacgttcgccgacaccaatgtagcggatagggataccaaactggtcagccaccgagaaaattaccccgcctttcgccgtgccgtccagtttcgttagcgtgatgccggttaagccaacggcttcatggaacagtttggcctggcttaccgcgttctgcccggtgctggcatcaatagtcagcataacttcatgcggcgcttcaacgtcgagtttcttcatcacgcggacgattttcttcaactcttccatcaggtgcgatttgttctgcaggcgtccggctgtatcggcaatcaggacgtcgatattacgcgctttagctgcctgaatggcgtcgaagataacagaggcggaatccgccccggtatgctgggcaatcaccggaatattgttgcgctgaccccagacctgaagctgttcaaccgcagctgcacggaaagtatcacccgccgccagcatcaccgatttaccctgctgctcaaactgacgcgccagcttaccaatcgtcgtggttttacccacaccgttgacgcccaccatcaggatcacaaacggcgctttgccttcaacattcagcggctcatcgactttcgccagaatctcgcccatctcttctttcagcaggccatagagcgcctcggcgtcacgaagctgcttgcgggatgcgccttccgtcagattggtgataattttacgtgtggtttccacacccacatcggcgatcaaaagctgctcttccagctcctcaaacagatcatcgtcgatttttttaccgcggaacaggctgataaatccggaaccgagattttctttggtttttaacaggctgcgtttcaggcgcgcgaaaaaaccttctttggtcggtttttcctgctcctgagcgatttcttccaccggctgctcttcttctgccggaggaaccaccatcaccgcctcttctgccgcttcggcagccagcgccgtttccagctcttcgtcggtaatttcttctttagccgcttcttcttccgccgcttcgacaatctctacggtttccgcttcagcctgccactcttctggcgaaaccgcttcggcgttgacgtcttccggcaacggcagctcttcacgttcgatagccactggctccggcgtttcttctacgaccggttccggctgtgcaacgacttccgcttcaggctgcgctttttcactttcagcaacctgttcagtgacttccacaacgtcggcagcaaaagtttccgcctcggcttcagtatgcgcttgcggctgctcttcaacggcttgttcagaggccttcacaggctcttgcgcctgaacgatttcttctacaaccggttgttcattctgaacttctgtctctttttccggggtctgctctttttgaccaaagcccagccaggaaaaaaagccacgttttttttctttcgccatttgcgactacactcctcgctgttgcttcatggcacagcgttaacgctatgtacatagcagctaaaaaaatgatgaaatagtctatcacttaacttaattcacatcaccgcctgcaagtatgtgttatctggcggattgagcaatttatcatgaaaaaaccgaatcattccggcagcggccaaatccgcattattggcgggcagtggcgaggccgtaaactcccggttcctgatagcccaggtctgcgccccaccaccgaccgcgtacgcgaaacgttgtttaactggctggctccggtcattgttgacgcccaatgtctggattgcttcgccgggagcggcgcgctggggctggaagcgttatcgcgctacgctgcgggggcaacgttgattgagatggatcgcgcggtttctcagcagttaattaagaatctggcgacactaaaagcaggcaatgcacgcgtggtgaacagcaacgcgatgtcattcctggcgcaaaaaggtacaccgcataatatcgtgtttgtcgatccaccgttccgccgtggcttgttagaagagacgataaatttactggaagataacggctggctggctgacgaagccctgatttatgtcgaaagcgaagtcgaaaacggtctgcccactgttccagcaaactggtcattacatcgggaaaaagtggcgggtcaggtggcttatcggctgtatcaacgcgaagcacaaggagaaagtgatgctgattaatattggtcgtttgttaatgctctgcgtttggggatttttaatcctcaacctggtgcatcccttcccacgcccgctgaatatcttcgttaacgtggcgctgatttttaccgtgctgatgcatggtatgcagctggcgctattgaaatccactttaccgaaagatggcccgcagatgaccaccgccgaaaaggtacggattttccttttcggcgtgtttgaactgctggcctggcagaagaaatttaaagttaaaaaataaccttattgttcgcctacaaagctgacaaagcgcgttcctttatagctcagcgtacctttatcgcccactgtcagggcgtggtactgctgggcgtcgaggcgaaacgtctgctccattcctccgctttgcggtttgaagcttgcctcatagcgtatactggtgcctgccggagtcacttcctgctggcgcgaacggcgatcgttaatcggtttttcccgcttgttgctcaccaccaccagcttttgctggagcggagccatatcattatcagctttttcccgtcgctgttgcataaaacgaaacgatgcggcgacgacaattaagccaatgataacaataaagaaaagaggtggtttgctcatctttatccctcatcggaaaatgcggaaataagcataccctgccagttatggtgttgtcatccgtccaccctcgccactaaactggaagcaagaccgtaggcattccgcttacgaaaaaataacgaattcaaggaactaagatgctttggtcgtttatcgctgtctgtctttccgcatggctatctgtggatgcatcgtatcgtgggccaacctggcaacgctgggtgtttaaaccgttaacccttcttctcctgctgttactggcctggcaagcgccgatgttcgacgccattagctatctggtgctggcagggctgtgcgcctcactgctgggcgatgcgctaaccctgttgccacgtcaacgtctgatgtacgccatcggcgcgtttttcctctcgcacctgctgtacaccatctatttcgccagtcagatgacgctctctttcttctggcctctaccactggtgctgctggttctgggtgcgctgttactggcgattatctggacgcgcctggaagagtaccgttggcctatctgcacgtttatcggcatgacgctggtgatggtgtggctggcaggtgaactgtggttcttccgtccgaccgctccggcgctctctgcgtttgttggcgcttcgttgctgtttatcagtaactttgtctggctggggagccactatcgccgacgcttccgtgcggataacgcgattgctgcggcctgctactttgccggtcacttcctgatcgtccgctcgctgtatctctgataaaacttgactctggagtcgactccagagtgtatccttcggttaatgagaaaaaacttaaccggaggatgccatgtcgactcctgacaatcacggcaagaaagcccctcaatttgctgcgttcaaaccgctaaccacggtacagaacgccaacgactgttgctgcgacggcgcatgttccagcacgccaactctctctgaaaacgtctccggcacccgctatagctggaaagtcagcggcatggactgcgccgcctgtgcgcgcaaggtagaaaatgccgtgcgccagcttgcaggcgtgaatcaggtgcaggtgttgttcgccaccgaaaaactggtggtcgatgccgacaatgacattcgtgcacaagttgaatctgcgctgcaaaaagcaggctattccctgcgcgatgaacaggccgccgaagaaccgcaagcatcacgcctgaaagagaatctgccgctgattacgctaatcgtgatgatggcaatcagctggggtctggagcagttcaatcatccgttcgggcaactggcgtttatcgcgaccacgctggttgggctgtacccgattgctcgtcaggcattacggttgatcaaatccggcagctacttcgccattgaaaccttaatgagcgtagccgctattggtgcactgtttattggcgcaacggctgaagctgcgatggtgttgctgctgtttttgattggtgaacgactggaaggctgggccgccagccgcgcgcgtcagggcgttagcgcgttaatggcgctgaaaccagaaaccgccacgcgcctgcgtaagggtgagcgggaagaggtggcgattaacagcctgcgccctggcgatgtgattgaagtcgccgcaggtgggcgtttgcctgccgacggtaaactgctctcaccgtttgccagttttgatgaaagcgccctgaccggcgaatccattccggtggagcgcgcaacgggcgataaagtccctgctggtgccaccagcgtagaccgtctggtgacgttggaagtgctgtcagaaccgggagccagcgccattgaccggattctgaaactgatcgaagaagccgaagagcgtcgcgctcccattgagcggtttatcgaccgtttcagccgtatctatacgcccgcgattatggccgtcgctctgctggtgacgctggtgccaccgctgctgtttgccgccagctggcaggagtggatttataaagggctgacgctgctgctgattggctgcccgtgtgcgttagttatctcaacgcctgcggcgattacctccgggctggcggcggcagcgcgtcgtggggcgttgattaaaggcggagcggcgctggaacagctgggtcgtgttactcaggtggcgtttgataaaaccggtacgctgaccgtcggtaaaccgcgcgttaccgcgattcatccggcaacgggtattagtgaatctgaactgctgacactggcggcggcggtcgagcaaggcgcgacgcatccactggcgcaagccatcgtacgcgaagcacaggttgctgaactcgccattcccaccgccgaatcacagcgggcgctggtcgggtctggcattgaagcgcaggttaacggtgagcgcgtattgatttgcgctgccgggaaacatcccgctgatgcatttactggtttaattaacgaactggaaagcgccgggcaaacggtagtgctggtagtacgtaacgatgacgtgcttggtgtcattgcgttacaggataccctgcgcgccgatgctgcaactgccatcagtgaactgaacgcgctgggcgtcaaaggggtgatcctcaccggcgataatccacgcgcagcggcggcaattgccggggagctggggctggagtttaaagcgggcctgttgccggaagataaagtcaaagcggtgaccgagctgaatcaacatgcgccgctggcgatggtcggtgacggtattaacgacgcgccagcgatgaaagctgccgccatcgggattgcaatgggtagcggcacagacgtggcgctggaaaccgccgacgcagcattaacccataaccacctgcgcggcctggtgcaaatgattgaactggcacgcgccactcacgccaatatccgccagaacatcactattgcgctggggctgaaagggatcttcctcgtcaccacgctgttagggatgaccgggttgtggctggcagtgctggcagatacgggggcgacggtgctggtgacagcgaatgcgttaagattgttgcgcaggagataaggcaaaccgatcgcaacattgagcgcgatcggtcccctcgcccctctggggagagggttagggtgaggggaaaaggcggcatcgaagccaatcagcccctatcaaccgcctttacgaatcaaataacgataaggcagtccatccgtctctttagcaaccagttcgtgttccataaaggtacaaaacccaggaatatcgcgggtagtggccggatcgtcggcgataatcagcaacgtttcgccaggctgcatattgcgcacggttttgcgcaccatcatcaccggttccgggcagcgcaggccaagcgcgtcgagtgtgtggtcagggctggaaaagagatcggtcattttcttctcatcacttaaaaaaacggcgctagtttacgccctgtgagtccgtaagcaaactaggttaacgattgcgtgaaaattaaccattgcattgtcaacgtaaagcagtatcatgcggcggctcgaaaaaagggtaagcacgttattatgttaaggtaacagacgtgtcgtacgtattgggttccctcaccccaatggttaatcaaaaaggtacaatatgaacgttttctcgcaaactcaacgctataaggcgttgttctggttatcgttatttcatctgctggtgatcacctccagtaactatctggttcagcttcccgtctccattttgggtttccataccacctggggcgcgtttagctttccgtttatttttcttgctaccgacctgaccgtgcgtatttttggcgcaccgctggcccgacgcattatcttcgcggtaatgatccctgcgttattaatctcctacgtcatctcgtcgctattctatatgggttcctggcagggattcggcgcactcgcccacttcaacctgtttgtcgcccgtatcgccaccgccagtttcatggcctacgcgctggggcaaatcctcgacgtgcacgtttttaaccgcctgcgtcagagtcgccgctggtggctggcaccgacagcgtccacactgttcggtaacgtcagcgacacgctggcctttttcttcattgccttctggcgtagcccggatgcctttatggctgaacactggatggaaatcgcgctggtcgattactgtttcaaagtgttaatcagtatcgttttcttcctgccaatgtatggcgtattactcaatatgctgttgaaaagactggcagataaatccgaaatcaacgctttgcaggcgagttaaaggttcgttatcagagttgtgataagatggatgaatgagccgttatggccgtttatcgaaaggaagaagtcaatgcgcaatctggttaaatatgtcggaattggcctgctggttatggggcttgcggcctgtgatgataaagacactaacgctacggcgcagggttcggtcgcggaaagtaacgctaccgggaatcccgtcaacctgcttgatggcaagttaagtttctcgctgccagcggatatgaccgaccagagcggtaagctgggaacgcaggccaataacatgcatgtctggtccgacgccaccgggcagaaagcagtcatcgtcatcatgggcgatgatccgaaagaagatctggcggtgctggcgaagcgtctggaagatcagcaacgtagccgcgatccgcagctgcaagtggtaaccaataaagccattgagctgaaaggtcacaaaatgcagcagttagacagtattatctccgcgaaaggccagacggcgtactcttccgttattctgggtaacgtgggtaatcaactgctgaccatgcaaattacgctgcccgctgacgatcagcaaaaagcgcagaccaccgcagaaaacatcattaatacgctggttattcagtaagttttaagatgatgaggcggcctcagggacgtgttccggaggccgtttttttaatcgccacgtcagtaataacgcgattgcgaccagtcccgccgccgccagataaatcaccggtacgcccgcccagctcatcaccagcccagccagtggtccagtcacgccaagcgataaatccataaatacggtgtaagttgccagcgccgccccctgattttgctgcggaaccgcttttaccgccactacacccaatgccgggaacaccagcgaaaacccggcccccgccagtaagacgccgattttcgccatccacggcatagtcgccacgccaaccagtagcaggccgattatctcaacgctaaagcaaatcatcgctacgtttaagccaccgatacggttaatgccgttagggaataacaaacgcgtaccgacaaacgcacagctaaacagcgtcagcgcgaaagccgcaccgtcccaacctttagcgtcataaaacagcgtgataaaggtggcgatgacgccaaatccggcggaagccagtgccagcgccataccgtacagccagacgcgcccaagcaccgcgcgaaacggcagcggtttgcctttactggcttttaccgtcggacgcgggatcgccaacaaaatggccaccagcgccacgcccataatgattaacgctaacgcctgcaagccgccccagtgataaaacacgacgcctaacggcgcacccatcgccatcgccccgtaagtgacaatgccgttccacgaaatcacccgcccgatatgcagcgagccaaccacgccaacgccccatagggtcgatcccgttccggcaaaactttgcccaatcccaaggatgacgcgccccaggcaaagtaataacaggctgatgacaggcagactggcggttaatcctgccgtcagataccccagaccgctcaaaaagcagccgcataaaccgaagacgacaatctttttgggtcccagcgaatcggcgtaacgtccggcatgagggcggctcagcaaggtggcgaaatattgcaggctgataaccaatcctgcccagaaggcgctaaagcccatcacatcatggacatagcccggtaatacagcgagcggcaacccgatggtgaggtagctggcgaagttaaacatgactatagagacaatgcgcaaattcaggcgcaatccgtttagcgcgggttcggctacgggttcgggcatgaggatcaccacatttttacaacagtgtttcatttttaccacgtgctgacgtgaaaatcagcagtaagaatcagaatattgctggcgtgactcccgctacacttaatacaaaaagtcacaaggaagccccaatggaaacccctcaacccgataaaacgggcatgcacattctgctcaagctggcctcgctggtagtgatcctcgcgggcattcacgcagcggcagatatcattgtgcagctgttactggcgctgttttttgccatcgtcctcaacccgctcgtcacctggtttattcgtcggggagtacaacgccccgttgccattacgattgtagtggtggtgatgctgatcgcactaaccgcgctggtcggcgtactggcggcatcgtttaacgaatttatctctatgctgccgaagtttaataaggagctgacgcgcaaactttttaaattgcaggagatgttgccttttcttaatttgcatatgtcgccggagcgaatgctgcagcggatggactcggaaaaagtggttaccttcaccacagcgctaatgaccgggctttccggggcaatggcgagcgtgcttttgctggtgatgaccgtagtttttatgctgtttgaagtgcgccacgtcccttacaaaatgcgttttgcgctgaataatccacagattcacatcgcgggattacaccgcgcacttaaaggcgtttcgcactatcttgcattgaagacgctactcagtttatggacaggtgtcatcgtctggctggggctggagctgatgggggtgcagtttgcgctgatgtgggcagtactggcgtttttgctcaactacgtgcccaatatcggcgcggtaatttccgccgtaccgccaatgattcaggtgctgctgtttaatggtgtttacgaatgtattctggtcggcgcattgtttttagtggtccatatggtcatcggcaatattttagaaccacggatgatgggccatcgcctggggatgtccaccatggtggtatttctttcattgttaatttggggatggctgctcggcccggtagggatgctactttcggtgccattaaccagcgtgtgtaaaatctggatggaaaccaccaaaggcggtagcaaactggcgattttactggggccgggcagaccgaaaagtcggttaccgggatgaggcgacaagtgatacgatacgcactttcattttccattaaacgttggccctgatatgtatcggatagttctggggaaagtttcgaccttaagcgcagctccactgccaccgggtttacgcgagcaagcaccgcaaggtccacgacgcgaacgctggctggcggggcgtgcattgctttcgcacacgctttccccgctaccggagatcatctatggcgaacaaggcaaacctgcatttgcgccggaaatgccgctatggttcaacttaagccatagcggtgacgatatcgccctgctgttgagtgatgaaggcgaagtcggctgcgatatcgaagtgattcgcccgcgcgccaactggcgctggctggcgaacgccgtattcagcctcggggaacacgctgagatggacgccgtgcatcctgatcagcaactggaaatgttctggcgcatctggacgcgcaaagaagccatcgttaaacagcgtggcggcagcgcctggcaaatcgtcagcgtagacagcacctatcactcctcgctgtcagtcagccattgtcagcttgaaaatttaagccttgcgatctgcacccctactccctttacgctcaccgccgacagtgtgcaatggatcgattcagttaactgatccgcccacccgactgcccatctattgatccagaacaggtaatcagtatgacgaatacttaaaatcgtcatacttatttccgccatctattttaatccattggggttaccatgctctccacactccgccgcactctatttgcgctgctggcttgtgcgtcttttatcgtccatgccgctgcaccagatgaaatcaccaccgcctggccggtgaatgtcgggccactaaacccgcacctttacacgcctaaccagatgttcgcccagagcatggtttatgaaccattggtgaaatatcaggcagacggttcggtgatcccgtggctggcaaaaagctggactcattcagaagatggtaaaacctggaccttcaccctgcgtgatgacgtgaaattctccaacggtgaaccgttcgatgccgaggcggcggcagaaaacttccgcgcagtgctcgataaccgtcaacgtcacgcctggctggagctggcaaaccagattgttgatgttaaagcactcagtaaaacagagctgcaaattaccctgaaaagcgcctactatcctttcctgcaagaactggccctgccccgtcctttccgttttatcgctccctcgcagtttaaaaaccatgaaaccatgaacggaattaaagcgccgattggcaccggaccgtggattttgcaggaatcgaaactgaatcagtacgatgtcttcgtccgtaacgaaaactactggggcgaaaagccagcgattaaaaagatcacctttaacgtcatcccggacccgactacccgcgcggtggcgtttgaaactggcgatatcgacctgctgtacggaaacgaagggttattaccgctcgataccttcgcccgctttagccagaatccggcttaccacacccaactgtcacagccgatcgaaaccgtgatgctggcgctcaataccgccaaagcccccaccaacgagctggcagtacgtgaagctcttaattacgcggtaaacaaaaaatcgctgattgataacgcgttgtatggcacccagcaggtcgccgacaccctgtttgccccttctgtgccctacgccaacctcggcctgaaaccgagccagtacgatccgcaaaaagcgaaagcgttgctggaaaaagccggttggacgctgcctgcgggcaaagacatccgcgagaaaaatggtcagccgctgcgcattgaactttcgttcatcggcaccgatgcgttaagcaaatcgatggcggaaatcattcaggctgatatgcgccagattggcgcagatgtctcgctgattggcgaagaagagagcagtatctatgctcgtcagcgcgacggtcgttttggcatgattttccaccgcacctggggcgcgccatatgatccacacgccttcctcagttcaatgcgcgtaccgtcacacgctgacttccaggcacagcaaggattagccgacaaaccgctgattgataaagagatcggcgaagtgctggcgacccatgacgaaacgcaacgtcaggcgctgtatcgcgacattctgacccgtctgcatgacgaggcggtttatctgcctatcagttacatctcaatgatggtggtatcaaaaccggagctgggtaacatcccctacgcgccgatcgccaccgaaattccgttcgaacagattaaaccggtgaaaccttaatgttgcgttacgtattacgccgctttctgctgctgatcccgatggtgctcgccgcctcggtgatcatttttctgatgctgcgcctcggtaccggcgacccggcgctcgattatttgcgtctgtctaacctgccgccgacgccggagatgctggcctctacccgcaccatgctgggactggatcagccgctgtacgtccagtacggcacctggttgtggaaggcgctgcatcttgactttggtatctcattcgccagccaacgcccggtactggacgatatgctgaacttcctgcccgccacgctggaacttgcaggtgcggcgctggtattaattctgctcacttccgtaccgctcggtatctgggcggcgcgccatcgcgaccgtctgccggatttcgccgtacgtttcatcgcgtttcttggcgtgtcgatgcctaacttctggctggcgtttttactggtgatggcgttttcggtgtatctgcaatggctacccgcgatgggttacggcggctggcagcacatcattttgcctgcggtttccattgcctttatgtcgctggcgattaacgcgcgtttactgcgcgccagtatgctggacgtcgccggtcagcgtcacgtcacctgggcgcgtctgcgcggcctgaacgacaaacagaccgaacgtcgccacatcctgcgcaatgcctcgctgccgatgatcaccgccgtggggatgcatatcggcgaactgattggcgggacgatgattatcgaaaacatctttgcctggccgggcgtcgggcgctatgcggtgtcggcgatttttaaccgtgactatccggtgatccagtgctttacgctgatgatggtggtggtttttgtggtctgtaatttgattgtcgatttgctcaacgccgcgctggacccgcgcattcgtcgtcatgaaggagcgcacgcgtgaactttttcctctcttcccgctggtcggtacgcctggcgctgatcattatcgccctgctggcgctgattgcgctcaccagccagtggtggctgccgtatgacccacaggcgattgatttgccgtcgcgcctgctttcgccggatgcgcagcactggctgggcaccgatcacttaggtcgcgatattttctcgcggctgatggcagcgacccgcgtgtcgctcggttcggtaatggcctgcctgctgctggtgctgacattagggctggttattggcggcagcgccgggttgattggcgggcgcgttgatcaggccaccatgcgcgtcgccgatatgtttatgaccttcccgacctcgattctgtcgttctttatggttggcgtgctcggcaccgggctgaccaacgtaattatcgccatcgccctgtcgcactgggcgtggtatgcacgcatggtgcgcagcctggtgatttcactacgccaacgcgagtttgtgctggcgtcacggctttccggtgcgggccatgtgcgggtgtttgtcgatcatctggcaggcgcggtgatcccttcgctgctggtgctggcaacgctggatatcggccatatgatgctgcacgtcgcggggatgtctttccttggcctcggtgtgaccgcgccgaccgccgaatggggcgtgatgattaacgacgcgcgccagtatatctggacccagccgctgcaaatgttctggccggggctggcgctgtttatcagcgtgatggcctttaacctggtgggtgacgcactgcgcgatcatctggaccctcatctggtgacggagcacgcacactaatgccgcaacagattgaactacgtaatatcgcgctacaggccgcgcagccgctggtacacggtgtatcgttaaccctgcaacgcgggcgcgtgctggcgttagtcggcggtagcggcagcgggaaatcattaacctgcgccgcaacgctgggcattttgcccgctggcgttcgccagacggcgggggaaattttagccgatggcaaaccggtttcgccttgcgccctgcgcggcatcaaaattgccaccatcatgcagaacccgcgcagcgcctttaatccactgcacaccatgcacacccacgcgcgggaaacctgcctggcgttagggaaacccgccgatgacgctacgcttaccgctgccatagaagcggtggggctggaaaacgccgcgcgcgtgctgaagctgtacccgttcgagatgagcggcggcatgttgcagcgcatgatgattgcgatggcggtgctgtgtgaatcaccgtttatcatcgccgatgaaccgaccaccgaccttgacgtggtagcacaggcgcgcatcctcgatctgctggaaagcattatgcaaaaacaagcgccgggaatgctgctggtgacccatgatatgggcgttgtggcgcgtctggcggatgacgtggcggtgatgtctgacggtaagattgtcgaacagggcgatgtagaaacgctgtttaacgcccccaaacatacagtgacgcgcagcctggtttccgctcatctcgccctctacggtatggagctggcatcatgactttacttaacatctccggcctttcccatcactatgcgcacggtggatttaacggaaaacatcaacatcaggcggtgctgaataacgtttccctgaccctgaaaagcggcgaaaccgtcgccctgctggggcgcagcggctgcgggaaaagtaccctcgcgcggttgctggtgggtttagaatcgcccgcgcaggggaatattagctggcgtggcgaaccgctggcgaaactcaatcgcgcccagcgtaaagcgttccgccgcgatattcagatggtatttcaggactccatcagcgccgtgaatccgcgcaaaaccgtgcgcgagatcctgcgtgaaccgatgcgccacctgctatcactgaaaaaatccgaacaactggcgcgcgccagcgaaatgctgaaggcggtcgatctcgatgacagcgttctcgacaaacgcccaccgcagttaagcggcggccagctccagcgcgtctgcctggctcgcgcgctggcggtcgaaccgaaactactgattctggatgaagccgtttctaaccttgatctcgtgttacaggcgggtgtcattcgcctgctgaaaaagctacaacaacagtttggcaccgcctgcctgttcatcacccacgacttacgcctggtagaacgcttttgccagcgggtaatggttatggacaacggacaaatcgtcgaaacccaggtggtgggagagaaattaaccttttcctctgacgccggacgtgtgctacaaaacgcggtattacccgcattccccgtgcgccgtcgcaccacagaaaaggtttaacgcaaatgcaacgagtcaccatcacgcttgatgacgatttactggagacgctggacagcctgagccagcgtcgtggttataacaaccgttccgaagctatccgcgacattctgcgtagcgccctggcgcaagaggccacccagcagcacggcacgcaaggtttcgcggtgctgtcgtatgtgtatgaacacgaaaaacgcgacttagccagccgcattgtctccacccagcatcatcaccacgacctctccgtcgccacgctgcatgtgcacatcaaccacgacgactgtctggaaatcgccgtgttgaaaggtgacatgggtgacgtgcagcattttgccgatgacgttatcgcccagcgcggcgtgcggcacgggcatttgcagtgcttgccgaaggaagattgagtctattattgggtcctttggtgaacgatcaacaaagggccactagcacacctgattcctctctaaataccctatccgaaccttctcttttgtaacgttctaaatatattcctaaaaatcttcaattcattgtgaccacaagtttttcttcgctttttcgtatgaagatactgtcattaaaataatagaaaaggattttacgatgagcggaaaaccggcggcgcgtcagggtgacatgacgcagtatggcggtagcattgttcagggttcagccggggtacgtattggtgcccccaccggcgtggcctgttcggtgtgccccggcggagtgacgtccggccatccggtcaatcccctgctcggtgcaaaggtccttcccggtgaaaccgacatcgccctgcccggcccgctgccgttcatcctctcccgcacctacagcagttaccggacaaaaacgcccgcgccggtggggagcctcggccccggctggaaaatgcctgcggatatccgcttacagctgcgcgataacacactgatactcagtgataacggcggcagaagcctgtattttgagcacctgtttcccggtgaggacggttacagccgcagcgagtcactgtggctggtgcgcggcggcgtggcgaaactggatgaaggtcaccggctggccgcactctggcaggcgctgccggaagaactccgcttaagtccgcatcgttatctggcgacaaacagtccgcaggggccgtggtggctgctcggttggtgtgagcgggtgccggaagcggatgaggtgctgcctgcgccgctgccgccgtaccgggtactgaccgggctggtggaccgcttcgggcgcacacagacgttccaccgcgaagccgccggtgaattcagcggcgaaatcaccggcgtgacggatggtgcctggcgtcacttccggctggtactgaccacgcaggcgcagcgggcagaagaagcccggcagcaggccatttccggcgggacggaaccgtccgcttttcctgataccctgccgggttacaccgaatatggccgggacaacggcatccgtctgtctgccgtgtggctgacgcacgacccggaatacccggagaatttacctgccgcgccgctggtgcgctatggctggacgccacgcggcgaactggcggtggtgtatgaccgtagtggcaaacaggtgcgcagctttacttacgatgataaataccggggccggatggtggcgcaccgtcacacgggccggccggaaatccgttaccgttacgacagcgacgggcgggtgacagaacagctaaacccggcaggcttaagctacacgtatcagtatgagaaagaccgcatcaccatcaccgacagcctggaccgccgtgaagtgctgcacacgcagggcgaagccgggctgaagcgggtggtgaaaaaggaacacgcggacggcagcgtcacgcagagtcagtttgacgccgtgggcaggctcagggcacagacggatgccgcaggcaggacaacagagtacagcccggatgtggtgacgggcctcatcacgcgcataaccacgccggatggcagggcatcggcgttttactataaccaccacaaccagttaacgtcagccaccgggcctgacgggctggaattgcgccgggaatatgatgaattgggccgtctgattcaggaaactgcccctgacggcgatatcacccgctaccgttatgataatccacacagtgacttaccctgcgcaacggaagatgccaccggcagccggaaaaccatgacgtggagccgttacggtcagttgctgagcttcaccgactgttccggttatgtaacccgttatgaccatgaccgcttcgggcagatgacggcggtgcaccgcgaggaagggctgagtcagtaccgcgcatacgacagccgtggacagttaattgccgtgaaagacacgcagggccatgaaacgcggtatgaatacaacatcgccggtgacctgaccgccgtcattgccccggacggcagcagaaacgggacacagtacgatgcgtggggaaaggccgtccgtaccacgcagggcgggctgacgcgcagtatggaatacgatgctgccggacgggtcatccgcctgaccagtgaaaacggcagccacaccaccttccgttacgatgtacttgaccggctgatacaggaaaccggctttgacggccgcacacagcgttatcaccacgacctgaccggcaaacttatccgcagcgaggatgagggtctggtcacccactggcactatgacgaagcagaccgcctcacgcaccgcaccgtgaagggtgaaaccgcagagcggtggcagtatgacgaacgtggctggctgacagacatcagccatatcagcgaagggcaccgggtggcggtgcattacaggtatgatgagaaaggccggctgaccggtgagcgtcagacggtgcatcacccgcagacggaagcactgctctggcagcatgagaccagacatgcgtacaacgcgcaggggctggcgaaccgctgtataccggacagcctgcccgccgtggaatggctgacctacggcagcggttacctggcaggcatgaaactcggcgacacaccgctggtggagtacacccgcgaccgcctgcaccgggaaacgctgcgcagcttcggccgttatgaactcaccaccgcttatacccctgccgggcagttacagagccagcacctgaacagcctgctgtctgaccgcgattacacctggaacgacaacggcgaactcatccgcatcagcagcccgcgccagacccggagttacagctacagcaccaccggcaggctgaccggcgttcacaccaccgcagcgaatctggatatccgcatcccgtatgccacagacccggcaggtaaccgcctgcccgacccggagctgcacccggacagcaccctcagcatgtggccggataaccgtatcgcccgtgacgcgcactatctttaccggtatgaccgtcacggcaggctgacagagaaaaccgacctcatcccggaaggggttatccgcacggatgatgagcggactcaccggtaccattacgacagtcagcaccggctggtgcactacacgcggacacaatatgaagagccgctggtcgaaagtcgctatctttacgacccgctgggccgcagggtggcaaaacgggtgtggcggcgtgaacgggacctgacgggctggatgtcgctgtcacggaaaccgcaagtgacctggtacggctgggacggcgaccggctgaccacgatacagaacgacaggagccgcatccagacgatttatcagccggggagcttcacgccactcatcagggtcgaaactgccaccggtgagctggcgaaaacgcagcgccgcagcctggcggatgcccttcagcagtccggcggcgaagacggtggcagtgtggtgttcccgccggtgctggtgcagatgctcgaccggctggaaagtgaaatcctggctgaccgggtgagtgaggaaagccgccgctggctggcatcgtgcggcctgaccgtggagcagatgcaaaaccagatggacccggtgtacacgccggcgcgaaaaatccacctgtaccactgcgaccatcgcggcctgccgctggcgctcatcagcacggaaggggcaacagcgtggtgcgcagaatatgatgaatggggcaacctgctgaatgaagagaacccgcatcagctgcagcagcttatccggctgccggggcagcagtatgatgaggagtccggcctgtattacaaccgccaccgctattatgacccgctgcaggggcgatatatcactcaggatccgattggactgaaggggggatggaacctgtatggatatcaattgaatccgatatcagacatcgaccccctgggtttatctatgtgggaggatgcaaaatcgggggcatgtactaatggtctttgcggcacactatccgctatgataggtccagataaatttgattctatagatagcaccgcatatgacgccttaaataaaataaatagccaatctatttgcgaagataaagagttcgctggtttaatatgtaaggataatagtggcagatatttctcaacagcacctaaccgaggagaaagaaaaggatcatatccattcaatagcccttgccctaatggtactgagaaagtatcagcttatcatactcatggtgcagatagtcatggagaatattgggacgaaatattttcaggtaaagatgagaaaatagttaaaagtaaagataacaatatcaagtcattttatttaggtacgcccagtggtaattttaaagcaatagataaccacgggaaggaaataacaaacagaaaaggattacctaatgtctgcagagttcatggtaatatgtaaaaaaatattgtttaggaactgtgtcattgtatctttgtttgtttttacatacaacacatgggcgcagtgtaataataatattaaaataatgcgcaagtatgaaagtgaaggtaaatataccgttagaaatttggttaaaaataaagctatagcattggaattagctgagatatatgttaagaatcgttatggacaggatgccgcagaagaagaaaaaccatacgaaatcactgagttaacaacaagttgggttgttgaaggtaccattcactcagaccaaattgctggtggggtttttattatagaaataggcaaaaatgatgggagaattctgaattttggccacggaaaataagtatgtaaggataatcaaacatcgtgtgcgctgatggcagagtaggtggaggactccagacagtcaaacgatagaaaaagatagcctttatggaggttcctgcaatgtcaaatacataccagaaaagaaaggcaagtaaagagtatggtttatataataaatgtaagaaactaaatgatgatgaattatttcgcttacttgatgatcgcaattccttgaaaaggatttcatctgccagagtattacagttaagaggggggcaagacgctgttagattggcaattgaattctgcactgacaaaaattatatccgtagagatatcggagcatttatactcgggcaaatataaatttgcaaaaaatgcgaagataatgtttttaatattttgaacaatatggcattgaatgataagagtgcttgcgttcgagctacggcaatcgagtcaacggccagggaaagatcatcaaaagttcactttttgcactaaataattcgcattttatgtttaaaaattgagatattccttattacctgaagctgttttttattgcttatacatgatcaaatactccttacctaattaaggagaacaaaatggaacttaaaaaattgatggaacatatttctattatccccgattacagacaaacctggaaagtggaacataaattatcggatattctactgttgactatttgtgccgttatttctggtgcagaaggttgggaagatatagaggattttggggaaacacatctcgattttttgaagcaatatggtgattttgaaaatggtattcctgttcacgataccattgccagagttgtatcctgtatcagtcctgcaaaatttcacgagtgctttattaactggatgcgtgactgccattcttcagatgataaagacgtcattgcaattgatggaaaaacgctccggcactcttatgacaagagtcgccgcaggggagcgattcatgtcattagtgcgttctcaacaatgcacagtctggtcatcggacagatcaagacggatgagaaatctaatgagattacagctatcccagaacttcttaacatgctggatattaaaggaaaaatcatcacaactgatgcgatgggttgccagaaagatattgcagagaagatacaaaaacagggaggtgattatttattcgcggtaaaaggaacccaggggcggctaaataaagcctttgaggaaaaatttccgctgaaagaattaaataatccagagcatgacagttacgcaatcagtgaaaagagtcacggcagagaagaaatccgtcttcatattgtttgcgatgtccctgatgaacttattgatttcacgtttgaatggaaagggctgaagaaattatgcgtggcagtctcctttcggtccataatagcagaacaaaagaaagagccagaaatgacggtcagatattatatcagttctgctgatttaaccgctgagaaattcgccacagcgatccgaaatcactggcacgtggagaataagctgcactggcgtctggacgtggtaatgaatgaagacgactgcaaaataagaagaggaaatgcagcagaattattttcagggatacggcacattgctattaatattttgacgaatgataaggtattcaaggcagggttaagacgtaagatgcgaaaagcagccatggacagaaactatctggcgtcagtccttgcggggagcgggctttcgtaatcttgccctgaatacaggactgagtatcaaaaagccggttaactgaaactgtccaggttttgggggtcagttcataaacgccttatccggcctaaaaacaactaaaattcaataaattgcaccgatgcgtagtccctataagcttacgcatcgggcaattgtatttacgccattgtcccaatcgtcttcctgaatcgcagcagcgcaatggtgaaaaatgcgccgccaattgccatcagcgtcagaaactgcggccagacgatttcgaatccggcaccccggtagaggatggcctgcgcgaggctaacaaagtgtgtcgtcggcatggtcagcataatgtcctgcaccatctgcggcatactttcgcgcggcgtggaaccaccggaaagcatttgcagcggcagcagcaccagaatcaccagcagccccagttgcggcattgaacgcgctatcgtccccataaaaatgccgattgacgtggtggcaaacagactgagcgccacgcccagcataaacagcgggatcgagccttcaatcggtacgcccagtacacctttcaccatcagcaccagcgataatcccgataccaccagcaccaccagccccatcgaccagatcttcgccatcatgatctcaaacggcgttatcggcatcaccagtaagtgttccaccgtgccgtgttcacgctcgcggatcagcgccgatccggtcaatacaatcgccagcatggtaatgttgttgatgatcgccatcaccccgccaaaccacgcgggatcgaggttcgggttaaagcgcatccgggtttccagcgataccaacggttcgctgttatcacggtagcgcgcgacaaagctgttcacttcaccgttgataatattctggatatacccattgccggtaaatgcctggctcatgcgcgtggcatcgacgttcacctgaatatccggctggcgtccggcgaggacatcacgctgaaaattaggcggaatatttatcgcgaaggtatagcgtccggcgtccagtccggcatccatctcatcggcggtgatcatctccggtggcaaaaaccacggacgatagaagctgttaacgatccggttcgataactgcgattgatccatatcggcaatggcgatcggcgcgaggttcaacgatcctggcgtaacggtcgctgacgaatacaccgacaccgtaaacgagaagacaatcagcgtcagcatcgctttatcaccgagcagactgcgcaactctttgatacccagattaaaaatattgcgtaaatggcgcatcatccctcctgttttttcagcagcaggatacttaagcccatcaccagcgggatggctatcagtaacgggataaaaagttgccacaaatcagtcagatccagcgctttcgagaacgtcccgcgggcgatagtcagaaaatgactggtcgggtaaacctcgccgatccaacgtccaggcccttccagcgaagctaccggatcgatcatcccggaaaactgtgtcgccgggatcaacgtgataatcgccgttccgaaaatggcggcaatctggcttttcataaaggtggagatcagcagccccattccggtggcaatgatgatatacagcagcgccgccagggtgagcgtcaggaaactgcctttatgcggtacgccaaacacaaacaccgacaggccgcagagcaggaaaaagttcagcatccccagcgcgatgtatggcaactgtttaccaagcaaaaattcactacgcgtggtgggggtcacgtaaaggttgataatcgacccaagctctttttcccgcaccacgctaagggcgcttagcattgacgggatcatcatcagcagaagcgggatcaccgccggaacaatcgctggcaggctttttacgtccgggttatagcgatagcgcgtctcaatattcatcagcccgctttggctggcgggtgtcgattgtcggctcgccacatcctgtaaccagctctggtgcatggcctgcacgtaaccttttaccgtttcagcacggctcggcatcgctccgtcgatccagacgccgagttccacaggcgtaccacgcgcgatatcgcgcccgaaattgggcgggatctcaatcgccaccgtgatatcgcccgcacgcatccgacgatcaagctcgtcataactggtgagcggcggctgttcgataaagtaacgggaaccggagaggttgagtgtccacgcctggctactgacggtctggtcgcggtcgagcaccgcaaagcgcaggttttccacatccatactgatgccgtaacccattatcagcatcaggatcaccgttcccatcagcgccagcgtcgaacgtactggatcgcgtcgcagttccagcgcttcgcggcggctgtagctaaacagacggcgcaggctaaatccctgacgcggcgcgtgggtggtgtcgtgtaccacgggcggcgcttcggcttcgttgctctgccctgccgcttcctgcaaataggcgataaatgcctcttccagactggcggctccgcgtttctcaaccagttcctgcggtgtaccgctggcaagcacttttccggcgtgcatcagtgagatgcggtcgcaacgttccgcttcgttcataaagtgggtggagatgaagatagtcactttgtcctggcgcgagagatcgaccatcaactgccagaacatatccctcgccaccggatcgacaccagaagtaggctcatcgaggattaacatctccgggcgatgaatcaccgccaccgccagcgaaagccgctggcgaatgccgagcggcaatgactccggcagaatatcttcaacgtcgttgagcttaaaacgctcgctcatttcagccactcttgcgggaatttccgcttccgggatgtgaaacaaacgggcatgtaactcaaggttttgccgcacggtgagttcgttatagagcgaaaacgcctgcgacatatagcccacccgacggcgggtatcgatatcttttggatcaaccggttgcccgaacagccacgcctcaccttcgctggcgggcagcagtccggtgagcattttcatggtggtggatttaccgcagccgttcgaaccaagaaaaccaaaaatctccccgcgtggaatgcggaaattaacgtgatcaacggcaacgaaggaaccaaaacgcatggtcagatcgcgcgcttcgatggcaatctctgcgttttcaggttgatacggtgggatcactaccgcctgatgcgcctggcgttgcgcttgcggtaacagatttataaatgcttcttccagcgtagcgctttgcgtttgctgccgtagctcttcggcgctgccagttgccagcacttctccggcattcatcgctaccagccagtcgaagcgttcggcctcttccatataggcggtggcgaccagcacgctcatattgctctgccgctggcgaatactgtcgatcagatcccagaactgggagcgggagagcgggtcaacccccgttgttggctcatcaaggatcaacagttccgggtcgtggattaacgcgcagcacagcccaagtttttgcttcatcccgccggagagtttccctgccggacgatcgcgaaacggtgctaacccggtgctggtcagcagctcattgattcgcacttcccgctccgctttgtcgtgaccgaacaggcgagcgaaaaaatcgacgttttcatacaccgacaaggtgtggtagaggtttttgcccagcccctgcggcatccaggcgatgcgcgggcagacgtcgcggcgatgcttcgggtcgcgcatatcgccgcccagcaccatcacattgccctgttcaatgacgcgggcaccggaaatcaacgacaacaagctcgacttcccgacgccgtccgggccaatcagcccgaccatacagcgggccggaatatcgagagtgatattgttcagcgcaacggtttttccataatgctggctcacgcccgccagttgcgcgacaggcgggacgggaaccagttccagatgcgtcattgcggcaacctcaccacgaggtcgtcaggccacggaagttcttcattcacccgcacccacgctacgcccggcaaaccggttttgacatattccagatgctgctggagtaattccggtgggatacgcgctttgacgcggaacatcagtttcagccgttcatcgctggtttcgacggtttttggcgtgaactgggcgacactggcgacaaaactgatggttgcaggaatacgcagatctggcgcggcatcgaggatcagccgggcttcaccgcccagtttcagcgtgcccgcctgttcggttggcaggaagaaagtcatatagacgtcgctgagatcgaccatattcagcacccgaccgcctgccgccagcacttcgcctggctcggcaacccgatactgcacgcgtccgtcacgcggggctttcagttcgctgtcatcgatatctgcggcaatgcgccgttcagtggcttgtgccgcttcgacgcgggtttgcgcctgaatgatattggtgcgtgccgcttctatagccgctttagaagccgatacctgagctttcgccgattccagcgcagctcgggcgctctcagcggcggcgcgatcgtcatccagctgttgcgcagaaatagcccctcgttgggccagtgaacgggaacgcgtatgacgttttgctacggagtccagttctgcctggcgttgattaaccagcgactgtgcggcacgagtttcgctttgtcgttgctccagcaaagcctgcgcggcagcaacggcgctttgtgcctctttgatttgcgcgatggcttccagtcgctgttcctgcaacacgcgagtatccatcttcgccagcacttcaccttcgcgaacaaacttgccttctttcaccagaatggtgtcgatacgcccggcaattttgctggcaatatccacttccgtcgcttcaatgcgcccattactgacagcaaagccttccggcacacctgccgggcgcaacagccaccacgccacgatagccgccaccgccagtaacccgacaacccaccacgccagatggcgcttactcttatccataatcgacccgccataatccctgtaagcaaacgacgcgtgttacaactgccgccgaacgacgttcagcggattcttccatccgggataagaaggaaacggcaaatacgaccagcgcgcagagcattgagcgccaacggggaaggcttagtgaaaacgggtagtaatgttgtcatcatcagcattcctggccgtaaatgaaacacgcatactcataagtgtgatctataaaactggctgacaaaacggtatccatcctgttggatagcgtttcacgcctgttcagttgcaggaacagagcattcctttttacgttttatcaacagtctcaaccagatagtaacattaatattcatgttgtctatggttcagagctgtaacattgtgcgccttctaatcaaaggcataagtccatttctgtttttttcatgctggtaagacttccagggagtggttatctcaggccctgcaccagggttaatttggcaattatgcatgctgaacattcttccagcatgtttactgtcacgggcgttaagacctaaaactgtccccgtttcgcctatgcgttctcttccaccatttccgttatgtgcaacaacttgatttatacctaacatttgtgaacatgctaatagtgcttcaagtttaggtctgtaatctgtcgaaacagaaaaataacgattaaaggatcgacaagagatagcccggctagttttaaactttttgccattaattatagcatgatgctttttattgataattgccgctaattcgaccggatcgagagcattggtcatttcatcaatagagactgttatcggtcctataatgtaacgttttcgctgatcatcaaaagttatcccatgatgatttgccattattttgtatttggggtcatagaaacatacaggataatcttttatcccagagtaggtatcctcatcgagtggtttcatacgcgtgaagttctgcatatagttaccattgcaattcgtttcatgatttccagctaatacatgaacattttcattgatactcattatgcgttttaacaaatcgatgataaattgatcaccacagatattgctaaatcgatcgccggtttggtcgcccagaaacgtacatggcgtcacagcgtctttattaataactaaataaggctgaagactttctaaaataatgtctcttctgttcaggatactgattattgtattaacattagtgttaagttgctcattaaagttctcccttagcaatacgttgagaacttcatcttctatattaagcaactggctaaggaaattttctccttcagccatgattcccaaatgtcccgttgcgaaaagcgcgaacaaaactgcaccgactgagccatcggtatcaccaaaataggttggtctggtacttgtgggatcaacgggtaaacaattggagaaatagattctgtcagcgaactggggttttatcattgtttcgaatttaatatcagatacattatattgcgatattttccagttccagatgggtttgtacgactcagtaactgcaacatcattagcattatcatttactgtcatattattaagtaaataaacaatactgcaccaattaatatcggtattatcaagagagcaaccgtaatttttgctattaattgtcacaataaactgataattattattcctacgtagaatatgagcacgcatgcccgatagcatactatatttttctgaatgatccgtttgtatggtaaatgaaattttgtcatcttgaatagattgttggaaccgttctatttgccaatcatctattttttccacaacctcaccgagcattgtcctggcaatacttgatatatcatcacctataccatttgcaatatacccaaacagttctttagtgaagttggtaacatgctcttgcaccatatcatttgttgcgattgtcgttgtactgtcgttagtgcctgccacagttccaattttcatattttacctcatattatttaccgcgaggaatacatagttaacattttatcttatgacatacacctcatgttcgatgggaaaataattatattttgcacaaatcattcagcctcaaagcataatatgaaatttcttatctcatagcagagaaagtccctaaagattgtagaggcgtcatcagaacatgcctctacaatcgattaagaaaacctatgaaatactggcaggattaaaaagacataccaccgtattcatggagttttaatgtagttgaaaacaactaagccctgaggaataaattattttattatttttatcacgtgcttccttcagggaatttagccccataataccattatcaaattgttgattatgatctaccccgggcccatgatgcccatatttttgtctaatgtatttgctggggtcttcacctttgagtgtctccccacatatgaagatacgttcacgtgctggtctgaaatcagtagtgttatcaaaataattagcatatacaggtgtgggtttcaaagtattgcttcggattagatggaatagaggatcatccatgtgttctttatgttttttattaaaaatattggctaattcctcaggatcagtaggatttttcatctgattaaatggaacctgcaaagcaccgagacaataacatttttttcttcatctcttattattccgtgatgactggttaaaacttgcctttctgagtcataattacaaacatcgagcgttttaattaagttatacgtatcaccggcagagagtttatgatttgctagtcgtgcagtatagttaccattaaaattgatttcatgatttccagccagaacgacgacatttttattaatacggctatctttattaccctccatatttcgcatagaatttagcaaagtaaggatatatttatcaccaaaaatagtactaaatctatcgcctgtatgatccccaaggaagatacaaggggttatcgcatcgtcctttaaaaaaacatgttgatgcaactcattcaagatcatgtctctcgtatttaataaatcgtagagcactttattatttttatgtttgtatgcagatgaagccatctcttcgtgttttaataattcacataataaactccaacccttttccctgatgcctatatgccctgaaacgagcaatgcataaagtacagcgcctactcttccatctgtatcgccaaaataagccgtgttggcattttgtgggttaatcacaccacactgtttatagaagtctatttttgaaaacacagatttaacatagctatcaaacttttccttagtaaacgtctctttagagacatcccaacgccagtcaggtttgaaattaccactaagaagagtaaagaaatttctcgctatgatagaaagcccatcaactttataaattatatctgatttatctccagaggaattaataaaataataaccgcccttacactcaacagtaacggtaatgggagacgataattttaacacatggttattgtctggtataattgtaaagataaacgtatcagtagtattgtcggcgaatctattatattcttgaatatctatagaaggttcactattataaaaccatactttctccatctggtgactacgatcatttaccttccagtgaccatgttgcaggaaatagatgatatgcaggccaaaatcgttatctatttgcgaatcattatccagtttatcaaattcaactatctttgcacgatgtgttttatcaaccttgccatggtgttgatgactgttaactttatctgaatgcttatcttgatggcttgaagagatgtttctaatctgattgtcaattgctttcataaataacctgtgatatttttgaattgtttgtaacaaaataaatgatacttgtctgaaaaacagatttacgacgatataaaataataatacttatatgttcgctgattttaagcaccgagactatccggtcttttaccaaataatgaagaataatccctccctggaagataattgtaaaaaacaacagcataagaattaatcttaggataaatttttatttatcatggccttttgaacgctgaaaagtagcgctctgcaaagtaaaccccgctatagttatgctatgcatttgtctttaatgatatctcgtcattatattaacaggatgaaattatcattaatgcatatttcaatattagcagggatacctgaggagtttaaagtgaacatatatatcgggtggcttttcaaattaatccctttgattatgggcttaatttgtatcgcgttaggtggctttgtgctggaaagttcagggcaaagcgagtatttcgtcgcgggtcatgtgctgatttctctggcggccatatgcctggcattattcactaccgcatttattatcatttcgcagctcacgcgcggcgttaatacgttttacaatacattgttccccattattggctatgcggggtcaattatcaccatgatatggggttgggcactgttagcaggcaatgatgtgatggcagacgagtttgtcgccggccatgttattttcggcgttggtatgattgccgcctgtgtatcgacggtggcagcgtcatccggtcactttctgctcattcccaaaaatgcagcggggagcaagagcgacggaacaccggtacaggcttattcttcattaatcggtaactgcctcattgccgttcccgttttactcaccctgctcggtttcatttggtctattacgctgttacgtagtgctgacataactccgcattatgtcgcgggtcacgtattgcttgggttaaccgcaatctgtgcctgtctaattggccttgttgccacaattgtccatcaaacacgtaatacgttttcaactaaagaacactggctgtggtgttattgggttatttttctcggctcaatcacggtactgcaggggatatacgtcttagtcagttccgatgcaagcgcccgactggctcccggcattattcttatttgcctcggaatgatctgttacagcatattctcaaaagtctggctactggcactggtatggagacgtacctgttcgttagccaacagaataccgatgattcccgtcttcacctgcctgttttgccttttcctggcatcgtttcttgcggaaatggcgcagaccgacatgggatattttattccttcgcgagttctggtcggtttgggagcggtatgctttacgttgttctcaatcgtttcaatattagaagcgggttctgctaaaaaataattgcaacgtaccggataaaaccagcgttgaccatttgcgtaacgctggtttttcttaggcatcatgaaataacgcagcattaatgcatagtggttaagtataaaaaacagcaaagttactgtttttttcaacctgttcatatttcataaagatctggccactgagtgagttttcaatcacctttccatccaccttatattaagcatggagggtttcagttcacgggctcattagaaaataatcacaagataaccactatcaaaattagctcatttttaatgcgactctaataattttcatctttaggaaataggtcaggacgactttgctgcaatcaaatcctgcgcacaagcccacgcactcgaccacgcccactggaagttatagccccccagccagccggtgacgtccatcacttcgccgatgaagtacagcccaggcactttgcgcgcttccatcgtccgtgaagagagttcgttggtgtccacgccgccgagcgtcacttcggcagtgcgatagccttcagtgccgttgggttgtacgcgccagtcggtcaatgtgctaatcagtgcctgttggtcacgcacgttgagctgttttagcgaaacatccgggatttgcccgagttgctgtaagcgttcaaccaaccgcttcggtagatgaaccgccagtgtgtttttcaggctttgattcggatgtgcgttacgctgctcattcaggaaggtttcgaggtccacatccggtagcagattgatgctgacaaattcccccggttgccagtagcttgaaatctgcaacaccgccggtccagacaagccgcggtgggtgaagagtaagttctcacggaaaacggtgccgttttcagcggtaatcacggaaggcaccgccacgcccgccagcacctgtaactcttcgagcaacggtttatgcagagtgaatggcaccagacccgcgcgggtcggcagcacgttgaggccaaattgttcggcaatcttataaccaaacggcgacgcgcccagccccggcattgacagcccaccagtcgcgatgaccagcttttcgcaaccgacagtcatgccgttcagatcaagcgtgaagcctgtttcatccttcgccacactcagcacttcgctacgcaatctgaaggtcacattgcccttctcgcactcatccaccagcatgtcgacaatctgctgcgcggagtcatcgcagaagagttgccctaacgttttctcgtgccaggcgatgccgtgtttattgaccagatcaatgaaatcccactgggtaaaacgtgcgagtgcagacttacaaaaatgcggattctggctcagataagcgcctggttcgacataaaggttggtaaagttgcagcgcccaccgccagacataaggattttgcgccctggttttttaccattatcgatcagcagaacccggcgtcctgcctgacctgccagcgcagaacagaacatacccgccgcaccagcgcctataataatggcatcaaacctttccacgttgcgctcctcttagaaaaaacgggcgtgaattgtaaagattcctcagtggtcgcaccagcatcaatattactaaaaggaagtatttgcctgaattatataagataattattttttgagtgaaatccatacagggggcaaatcaaaaaaagtctatatttcactttgcccgcgccgcgaaagtcactgataatgcgccgcgttcatgtcctcaaaatggcgtaacgtcctatgctacatttgtttgctggcctggatttgcataccgggctgttattattgcttgcactggcttttgtgctgttctacgaagccatcaatggtttccatgacacagccaacgccgtggcaaccgttatctatacccgcgcgatgcgttctcagctcgccgtggttatggcggcggtattcaactttttgggtgttttgctgggtggtctgagtgttgcctatgccattgtgcatatgctgccgacggatctgctgcttaatatgggatcgtctcatggccttgccatggtgttctctatgttgctggcggcgattatctggaacctgggtacctggtactttggtttacctgcatccagctctcatacgctgattggcgcgatcatcgggattggtttaaccaatgcgttgatgaccgggacgtcagtggtggatgcactcaatatcccgaaagtattaagtattttcggttctctgatcgtttcccctattgtcggcctggtgtttgctggcggtctgattttcttgctgcgtcgctactggagcggcaccaagaaacgcgcccgtatccacctgaccccagcggagcgtgaaaagaaagacggcaagaaaaagccgccgttctggacgcgtattgcgctgatcctttccgctatcggcgtggcgttttcgcacggcgcgaacgatggtcagaaaggcattggtctggttatgttggtattgattggcgtcgcgccagcaggcttcgtggtgaacatgaatgccactggctacgaaatcacccgtacccgtgatgccatcaacaacgtcgaagcttactttgagcagcatcctgcgctgctcaaacaggctaccggtgctgatcagttagtaccggctccggaagctggcgcaacgcaacctgcggagttccactgccatccgtcgaataccattaacgcgctcaaccgcctgaaaggtatgttgaccaccgatgtggaaagctacgacaagctgtcgcttgatcaacgtagccagatgcgccgcattatgctgtgcgtttctgacactatcgacaaagtggtgaagatgcctggcgtgagtgctgacgatcagcgcctgttgaagaaactgaagtccgacatgcttagcaccatcgagtatgcaccggtgtggatcatcatggcggtcgcgctggcgttaggtatcggtacgatgattggctggcgccgtgtggcaacgactatcggtgagaaaatcggtaagaaaggcatgacctacgctcaggggatgtctgcccagatgacggcggcagtgtctatcggcctggcgagttataccgggatgccggtttccactactcacgtactctcctcttctgtcgcggggacgatggtggtagatggtggcggcttacagcgtaaaaccgtgaccagcattctgatggcctgggtgtttacccttccggctgcggtactgctttccggcgggctgtactggctctccttgcagttcctgtaatcgtacgcaccaaaacgagcgggtcagctggcccgcttcagattgtgacatagtgcgctttgttcatgccggatgcggcgtgaacgccttatccggcctacaaaaacatgcaaattcaatagattgcagagattatgtaggcctgataagcgtagcgcatcaggcaattttgcgtttgtaatcagtctcgagcgggtcagtttactggcccgctttttttatgcgttattattgctgaagtgcttaatgccaaatcatcaatgcaatcaggctgaccaccaccagaccacacaatgcgctggtcagaataaactgccgacgcacccgctcacagcggcgaataaattcatcatcgtgatgatcgcgataacgttgggcatagatataccaaacgagacgcacctgtttgttgggttggccatgtgaggtaaaaaagccccctccatcaacatattgatagagcaatggatcgcagttacgcagtaccactaacaacgcgcgtagtgatgagaaatagcgcgccatgttaacaatgcaaacgacacataaagcccaaaataatgcgacggtgcttatcatacctcctccccggcgacctgcccgcggagttccaccccggggctaccgctcccgatacgctgccaatcagttaacaccaggtcctggagaaaccgcttttgtggtgaccaacatacgagcggctctatagatagtgtaggagatcaggttgttttttttccagaaggttaaccactatcaatatattcatgtcgaaaatttgtttatctaacgagtaagcaaggcggattgacggatcatccgggtcgctataaggtaaggatggtcttaacactgaatctttacggctgggttagccccgcgcacgtagttcgcaggacgcgggtgacgtaacggcacaagaaacgctagctggccagtcatcgacaactttatggaaggagtaacactatggcttataaacacattctcatcgcggtcgacctctccccggaaagcaaagttctggtagagaaagcagtctctatggctcgcccctacaatgcgaaagtttctctgatccacgtagatgtaaactactctgacctatacaccgggcttattgatgtgaatctgggtgatatgcagaaacgcatctctgaagagacacatcatgcactgaccgagctttccactaatgcaggctacccaatcactgaaaccctgagcggcagcggcgacctgggccaggttctggtcgatgcaatcaagaaatacgatatggatttggtggtttgtggtcaccaccaggacttctggagcaaactgatgtcttccgcacgtcagctgatcaacaccgttcacgttgatatgctgattgttccgctgcgcgacgaagaagaataatcttccctctacgacgtgttcctgaacgcccgcatatgcgggcgttttgctttttggcgcgccttgttacctgatcagcgtaaacaccttatctggcctacggtctgcgtacgcaatcaaaatccccagccaatacaacatttaacaccatcatattttccatcattagtgtgatcatctggttattttctgttgtaatagtgtattaatctattcaccgcatcaatattaagaatctctgacagatgtaaactttttcgcgcgttatcccttacgcgttcatacttttcaggatggtattggaaggttaataaatatgaatacaacaacacccatggggatgctgcagcaacctcgcccatttttcatgatcttttttgtcgagttatgggagcgattcggctactacggcgtgcagggcgtactggcggttttcttcgttaaacagcttggattctcgcaagagcaggcttttgtcacttttggtgcttttgctgcgctggtctatggcctcatttccattggcggctatgtcggcgaccacctgctggggaccaaacgcaccattgttcttggagcacttgtgctggcgattggctacttcatgaccggcatgtcgctacttaagcctgacctgattttcatcgccctggggactatcgctgtcggtaacggcctgtttaaagctaacccagccagcttgctttcgaagtgctatccgccgaaagatccgcggcttgatggcgcattcaccctgttctatatgtcgatcaacatcggctcgttgatagcgttatcgctggcccctgtgatcgctgatagattcggttattcagtcacctacaacctgtgcggggcggggttaattatcgcattactggtttacatcgcctgtcgtggaatggtgaaagacattggttctgaacccgacttccggccaatgagcttcagcaaactgttgtacgtgttacttggcagcgtggtgatgatcttcgtatgcgcatggctgatgcacaacgtagaagtcgccaatctggtgctgattgttctctccatcgtcgtcaccatcatcttctttcgtcaggcattcaagctggataaaaccgggcgcaataaaatgtttgtcgcctttgtcctgatgctcgaagcggtggtgttttacattctctacgcccagatgccaacatcgctgaacttctttgccatcaacaacgtgcatcatgaaattctcggtttttccatcaacccggtcagcttccaggcgcttaacccgttctgggtggtactcgccagcccaatactggcaggcatttacacgcatctgggtaacaaaggcaaagacctctcgatgccgatgaaatttactctcggcatgtttatgtgctcactgggctttttgacggcggcagctgcgggaatgtggtttgcggatgcacaagggctgacatcgccatggtttatcgtgctggtgtacttattccagagcttaggtgaactgtttattagcgcccttggcctggcgatgattgctgccctggtgccgcagcatttgatgggctttattctcgggatgtggttcctgacgcaggctgccgcgttcttgctgggcggctatgtggcaacatttaccgcggtgccggacaacattaccgatccgcttgagacgttgcccgtctataccaacgtgtttggtaagattggtctggtcacgctgggcgttgcagtagtgatgctgttgatggtgccgtggctgaaacgcatgattgcgacgccggaaagccattaattattcttgcagaaagcagggtagcgttatcgctaccctgttttagttttacactggcgtacctgcatagatatcaaagcgatgccctttagtgactaccgcgtttggcgtggcgacattcgccagcggtggcgcgtagtccgggcgctttaccaccacgcgtttggtcgccagcaagcgtgcaggctccagtaatccatcggcatcaagatccggtcccaccagcgactgaaagacacgcatctcttttttcactagcgcgcttttctgcttatgcgggaacatcgggtcgagataaaccacctgcgggcgcggggtaatatcagtcagcgccgtcaggctggaggcgtgaattaactgcaaccgctcctgcaaccagccgccgatttccgcatccgcataaccacgcgccaggccgtcgtcgagtagcgcggcaaccactggattacgctccagcatccgcacgcggcagccgactgaagccagtacaaaggcatcgcgcccaagtcctgcagtggcatccaccacatccggcaaataatcgcctttaatgcccaccgctttcgccaccgcctcaccgcgaccaccgccgaatttgcgtcggtgcgccatcgctccgccaacaaaatcaacaaagatgccgccaagttttggctcatcacgcttgcgcaattccagatgttccggcgttaacaccagcgccatcaggttgtcttcatcgtgctccagcccccagcgggccgccagaacagataaggcaccgtctccggtgcctgtttcatcaattaagcagattttcactgaatgatcagcccttaatgccgtaatgctccagcatcgcatccagctgcggttcacgaccacggaagcgtttgaacagatccatcggctcttctgaaccgccacggctcagaatgttgtcgaggaacgactgcccggtttcacggttgaaaatgccctcttcctcaaagcgcgagaaagcatctgccgccagtacgtcagcccacaggtagctgtagtaacctgcggcataaccaccggcgaaaatatggctgaaagcgtgcgggaaacggccccaggacggagatggcaccacggcaaccagtttcttgatttctgccagagtttcgaggatttttgccccctgatccgggcggaactcggcatgaaggcggaaatcaaacaggccgaactccagctgacgcagaataaacagcgccgcctggtagttcttcgccgccagcattttatccagcaactctttcggcagcggttcgccggtttcatagtgaccagagataaacgccagcgcctccggctcccagcaccagttttccataaactgactcggcagttcgaccgcatcccacggcacaccgctgataccggaaacaccagcggtttcgatgcgggtcagcatatggtgcaggccgtgaccgaactcgtggaagagggtgatcacttcgtcgtgagtgaacagcgccggtttaccatttaccgggcggttgaagttacaagtcaaatacgcgaccggtttttgcaaagaaccatcagctttacgcatctggcctacgcagtcatccatccacgccccgccgcgcttgttttcacgggcatacagatcgaggtagaagctaccgcgcagttcgttattttcgtcatacagttcgaagaaacgtacatccggatgccagacatcaacatctttacgctctttagcggtgatgccgtaaatacgcttaaccacttcaaacaggccgttaaccgctttgttttccgggaagtacggacgcagctgttcgtcactgatgctgtagaggtgctgtttttgtttttcgctgtagtaagcgatatcccacggctgcaactcatcgacgccaaattcggctttggcaaaggcacgcaattgcgccagctctttttcgccttgtggacgcgcgcgttttgccagatcggttaagaaatccagcacctgctgcgggttttctgccattttagtggcaagggatttaaaggcgtagttttcaaagcccagcagttgcgccagttcgtgacgcagcgcgaggatctcttccatcaccttgctgttatcccatttaccggcgtttgggccttgatcggaggcgcgggtgctgtaagcgcgatacatctcttcacgcagagcctggttgtcgcagtaggtcattaccggcaagtagcttgggatatccagcgtcagcaaataaccttccagctctttcgcttcggcctgggcttttgccgcagccagcgcgctttctggcatccccgccagctccgcttcgtcggtaacgagtttggtccagcccattgtcgcatcgaggacgttgttgctgtactggttgcccagttcagaaagacgggtcgcaatttcgccgtaacgctgctgtttctctttcggcagacctatgccagagagttcaaagtcgcgcagtgcgttatcaaccgctttcttctgcgccgtgttcagcgtggcgtaatgatcgccatcgcgcaggtcgcgatacgctttatacagcccttcatgttgccctacccaggtgctgtattccgacagcagcggcagggtttgttcgtaggcttcacgcagttccgggctatttttcaccgagttcaggtggctgaccggggagaagatacgccccaacacatcgtccacttccgccagcggctggcagagattttcccaggtgtacggtgccccttgcgctactacgcgctccacgttttcgcggcagtcgttcaatgccttagtcacggctggaacgacatgttccgggagaattttagaaaacggaggcaattcaaagggagtcagtaacggattcgtcattcgcgcagtcctggttaaagaggttaaggaagcgctcaacaggcgctttacataatgtgtgtagcatggggttaagtgtagtgaatttcaatgagaaacgttacgctttcgcggcggcggcctcttttcggtatactgtcctgatacgcttttgtgcgccccgaatacgggccgatttttacttaccggaacacctttacccatgctcagttatcgccacagctttcacgctggcaaccacgccgacgtccttaaacataccgttcagagcctgatcatcgagtcgctgaaagagaaagataaaccgtttctctatctcgacacccacgcaggggccgggcgttatcagttaggcagcgaacatgccgagcgtaccggcgaatatctcgaaggcatcgcccgtatctggcagcaggacgatttgcccgcagaactggaggcgtacatcaatgtggtaaaacacttcaaccgtagcggtcagttgcgttactaccccggttcgccgttgattgctcgcctgctactgcgtgaacaggacagcctgcaactgaccgaactgcacccgagcgattacccgttgttgcgttctgaatttcagaaagatagccgtgcgcgtgtcgaaaaagccgacggtttccagcagcttaaggccaaactgccgccggtttcccgccgtggtttaatccttatcgacccgccgtatgaaatgaaaactgactatcaagcggtggtcagcgggatagcagaaggttacaaacgtttcgccactggtatttacgcactgtggtatccggtggtgctgcgtcagcaaattaagcgcatgatccacgatctggaagcgaccggtattcgcaaaattctgcaaattgaactggcggtactgccagacagcgatcgccgtggcatgaccgcttccggcatgattgtgattaacccgccgtggaaactggaacaacagatgaataacgtgctgccgtggctgcacagcaaactggttccggcaggcaccgggcacgccaccgtaagctggatcgtgccggagtaattgcagccattgctggcacctattacgtctcgcgctacaatcgcggtaatcaacgataaggacactttgtcatgactaaacactatgattacatcgccatcggcggcggcagcggcggtatcgcctccatcaaccgcgcggctatgtacggccagaaatgtgcgctgattgaagccaaagagctgggcggcacctgcgtaaatgttggctgtgtgccgaaaaaagtgatgtggcacgcggcgcaaatccgtgaagcgatccatatgtacggcccggattatggttttgataccactatcaataaattcaactgggaaacgttgatcgccagccgtaccgcctatatcgaccgtattcatacttcctatgaaaacgtgctcggtaaaaataacgttgatgtaatcaaaggctttgcccgcttcgttgatgccaaaacgctggaggtaaacggcgaaaccatcacggccgatcatattctgatcgccacaggcggtcgtccgagccacccggatattccgggcgtggaatacggtattgattctgatggcttcttcgcccttcctgctttgccagagcgcgtggcggttgttggcgcgggttacatcgccgttgagctggcgggcgtgattaacggcctcggcgcgaaaacgcatctgtttgtgcgtaaacatgcgccgctgcgcagcttcgacccgatgatttccgaaacgctggtcgaagtgatgaacgccgaaggcccgcagctgcacaccaacgccatcccgaaagcggtagtgaaaaataccgatggtagcctgacgctggagctggaagatggtcgcagtgaaacggtggattgcctgatttgggcgattggtcgcgagcctgccaatgacaacatcaacctggaagccgctggcgttaaaactaacgaaaaaggctatatcgtcgtcgataaatatcaaaacaccaatattgaaggtatttacgcggtgggcgataacacgggtgcagtggagctgacaccggtggcagttgcagcgggtcgccgtctctctgaacgcctgtttaataacaagccggatgagcatctggattacagcaacattccgaccgtggtcttcagccatccgccgattggtactgttggtttaacggaaccgcaggcgcgcgagcagtatggcgacgatcaggtgaaagtgtataaatcctctttcaccgcgatgtataccgccgtcaccactcaccgccagccgtgccgcatgaagctggtgtgcgttggatcggaagagaagattgtcggtattcacggcattggctttggtatggacgaaatgttgcagggcttcgcggtggcgctgaagatgggggcaaccaaaaaagacttcgacaataccgtcgccattcacccaacggcggcagaagagttcgtgacaatgcgttaaatgttaaagggctaagagtagtgtgctcttagcccttaattacgtttccgctatcagttcagaagctgaagcagaaagcggatcagttccagcagcgcaattaacgcccctagaacgatgattgctttatcaatcacccgttttctccatgcgatggagtgagaatgcatccgcttactcatccactgcctgtcacggcgcatgtctcattgttagataagaactctctcactccggccagagcatcagttaacggcaccacccgtacttctgaccaggactttgaaagcgtttatgcgcattgccagagtgaaaatgcctcagagctaactggataatcatacagtacatgcaggttataaaaccagcacgtccttgcaatagtttcagtatggtattagcattgatgcgttagatgatggctatctcactccagtcagagccaccaactcagggctggaaagtaaaaaaccgacgcaaagtcggtttttttacatccggattcggacaaggcttaatatgacgatgacccagtgaaagtatataaatcgtcactgcgatatataccgaagtgctccctccgccagctgaagaaatcgctaattcttgcaatgttagccactggctaatagtattgagctgttagataagaactctctcactccagccagagccaccaactcagggctggaaagtaaaaaaccgacgcaaagtcggtttttttacgtcctgattcagacctcctttcaaatgaatagccaactcaaaattcacacctattaccttcctctgcacttacacattcgttaagtcatatatgtttttgacttatccgcttcgaagagagacactacctgcaacaatcaggagcgcaatatgtcatttctgttacccatccaattgttcaaaattcttgctgatgaaacccgtctgggcatcgttttactgctcagcgaactgggagagttatgcgtctgcgatctctgcactgctctcgaccagtcgcagcccaagatctcccgccacctggcattgctgcgtgaaagcgggctattgctggaccgcaagcaaggtaagtgggttcattaccgcttatcaccgcatattccagcatgggcggcgaaaattattgatgaggcctggcgatgtgaacaggaaaaggttcaggcgattgtccgcaacctggctcgacaaaactgttccggggacagtaagaacatttgcagttaaaaatttagctaaacacatatgaattttcagatgtgttttatccgggaggcattatgttactggcaggcgctatctttgtcctgaccatcgtattggttatctggcagccgaaaggtttaggcatcggctggagtgcaacgctcggcgcagtactggcgttagttacgggcgtggtccatccgggtgatattccggtggtgtggaatatcgtctggaacgcgacggctgcgtttatcgccgtcattatcatcagcctgctgctggatgagtccggcttttttgaatgggcggcgctgcacgtctcacgctggggtaatggtcgtggtcgcttgctgtttacctggattgtcctgctcggtgctgccgttgccgccctgtttgccaatgatggcgcggcgcttattttgacaccgattgtcatcgccatgctgctggctttagggttcagtaaaggcactacgctggcgttcgtgatggcggccggattcattgccgataccgccagcctgccgcttattgtctccaacctggtgaatatcgtttccgctgatttctttggcctcggctttcgcgaatacgcctcggtgatggtgccggtggatatcgccgcgattgttgccacgctggtgatgttacatctctattttcgcaaagatattccgcagaactacgatatggcgctgctgaaatctcccgcagaagcgatcaaagatcctgctacgttcaaaactggctgggttgttttactgcttctgctggtgggatttttcgtcctggaaccgctcggcattccggtgagcgccattgcagctgtgggcgcgctgatattatttgtcgtcgctaaacgcggtcatgcgattaatacgggtaaagtcctgcgcggtgccccctggcagattgtcatcttctcgctcggcatgtatctggtggtttatggcctgcgcaatgccggattaacggaatatctttctggcgtactcaacgtgctggcggataacggcctgtgggccgcgacgctcggcaccggattcctcaccgccttcctctcttctattatgaacaatatgccgacggtactggttggcgcgttgtccattgatggcagcacggcatctggcgttatcaaagaagcgatggtttatgccaatgtgattggctgcgatttgggaccgaaaattaccccaattggtagcctggctacgctactctggctgcacgtactttcgcagaagaatatgactatcagctggggatattacttccgtacagggattatcatgaccctgcctgtgctgtttgtgacgctggctgcgctggcgctacgtctctctttcactttgtaatgagatactgatatgagcaacattaccatttatcacaacccggcctgcggcacgtcgcgtaatacgctggagatgatccgcaacagcggcacagaaccgactattatccattatctggaaactccgccaacgcgcgatgaactggtcaaactcattgccgatatggggatttccgtacgcgcgctgctgcgtaaaaacgtcgaaccgtatgaggagctgggccttgcggaagataaatttactgacgatcggttaatcgactttatgcttcagcacccgattctgattaatcgcccgattgtggtgacgccgctgggaactcgcctgtgccgcccttcagaagtggtgctggaaattctgccagatgcgcaaaaaggcgcattctccaaggaagatggcgagaaagtggttgatgaagcgggtaagcgcctgaaataaagcggcgatatcccccccacaggttgttagaaaagtgcgctttatttatgtcggatgcgacgctggcgcgtcttatccgacctacaaagttatgaaaattcgatgaatagtatgttatttgtaggcctgacaggcgtagcgcatcaggcgattttgctatttacacagtactccctgcgtgagattccaattatcgcgtccagcatggtgtatcagtgagctgcttagttatcagcgatacagcgcagtagtttaaagacgtactggattatgatttatcagtggtttacacaacaaattattaaataattataagataccttaacccattttattattacacatctaaaacatcacaaaaaaaatcacttcacacactatcagagaacataataactttttaaaatgagcgcattttgatagttgttaacgatttcctttacgatactatcactaccctttttttacacacaaatattaccgggtggagataaaagggaaatcaaaggtaattatatcaggaagatataacgcattacatttattgtgtgtagaagaaaatccattcctgttctaattatccaatttaaacatcttagcataaaacaaatgatgaataaggaattttatgtcaattgactttaccccaggtataataaatacatatcacggcgatatttataactgcacaacaaataccgataatgctaaaacgccagacacaccgaagtggccttgcgataattgggaagaacaacaacccattaattccacattctctggagaaggatatatctctgatcaatatgatttagcgcaacaccaacttcaacaaattaatgcgtgccacacgaacactacatatacaaatgcagactactcaaaagttgtggctcaacttgtaagtcttattactaacattgaaacgataagttcgacacaacttacgcaacagacacaatcaatacttaatcagattaataacattagatatgaaaaaaacaaaagtgctgaatgtcgaatcattgttatcgctaatcctaaacccgacaaggcaatcataactaaaattagcgtagaagagggaatacccataacattcagtgtccaaaccatgttttcagatactaattttattgctgaacaacgagctgacttaccaactaatataaaagatattcaaagcctgtatcaaaaaatgacgaagttatatattgagcacagtgaaaataaaaacaggatgaaagtctttgccggaaccaactttattgatttcaatatgacaggacagaacctgtccgggttcgttctaaccttgtcaaggttttatttcgaagatctacttaatataaatttcactgacgcaaatttagggaaggtgcgaataagcggggaaattcttctcggctgactcagtcatttcatttcttcatgtttgagccgattttttctcccgtaaatgccttgaatcagcctatttagaccgtttcttcgccatttaaggcgttatccccagtttttagtgagatctctcccactgacgtatcatttggtccgcccgaaacaggttggccagcgtgaataacatcgccagttggttatcgtttttcagcaaccccttgtatctggctttcacgaagccgaactgtcgcttgatgatgcgaaatgggtgctccaccctggcccggatgctggctttcatgtattcgatgttgatggccgttttgttcttgcgtggatgctgtttcaaggttcttaccttgccggggcgctcggcgatcagccagtccacatccacctcggccagctcctcgcgctgtggcgccccttggtagccggcatcggctgagacaaattgctcctctccatgcagcagattacccagctgattgaggtcatgctcgttggccgcggtggtgaccaggctgtgggtcaggccactcttggcatcgacaccaatgtgggccttcatgccaaagtgccactgattgcctttcttggtctgatgcatctccggatcgcgttgctgctctttgttcttggtcgagctgggtgcctcaatgatggtggcatcgaccaaggtgccttgagtcatcatgacgcctgcttcggccagccagcgattgatggtcttgaacaattggcgggccagttgatgctgctccagcaggtggcggaaattcatgatggtggtgcggtccggcaaggcgctatccagggataaccgggcaaacagacgcatggaggcgatttcgtacagagcatcttccatcgcgccatcgctcaggttgtaccaatgctgcatgcagtgaatgcgtagcatggtttccagcggataaggtcgccggccattaccagccttggggtaaaacggctcgatgacttccaccatgttttgccatggcagaatctgctccatgcgggacaagaaaatctcttttctggtctgacggcgcttactgctgaattcactgtcggcgaaggtaagttgatgactcatgatgaaccctgttctatggctccagatgacaaacatgatctcatatcagggacttgttcgcaccttccttaggtgacactatttttttacataaagaacaccctacccccaaattatataaagatggacaatatcttgacaaacaaatcgaaggtttattttcaacattattaaccattaatgacaaccttttacgagcaaaagcggaaattgcttcgacaataattaaatttttagaggccaggataaccaatctttcatacaatgacatattaaaatatcagcaagaattccaaagacaatgttataagcaagttaaagcctttacgacactctcccgatacaataaaattcaaacatgggcagaaatgtctgaatatcaattcgaagtatttcaatacgagacgcttaacccaaaaaaaatgtcacacacgccttatttaaagaggccactgcctaatgaaaaagatataaattatggggtggaaatagaaataccatctggtaaaagaattcgcttatcaaatcattaccagaatataataccataatattgattattagcactttataatcattgaataaaaatagattttatgtacttttaaaacaatgcactatattatggggtgatggatattcatgtcacgccccaaaattaactgagttcacctaaacagaaaggatataaacatcagacaggtttacgttactatcaggcatatcacctcagaatcagatgaaaactataaagaaatatctattatggttttaatatttgttgataaggatagtaacatgaacatgacaaaaggtgcactcatcctcagcctttcatttttgcttgccgcatgtagttcaattccgcaaaatatcaaaggcaataaccaacctgatattcaaaaaagttttgttgctgttcataaccagccggggttatatgttggtcaacaagcgcgctttggtgggaaggttatcaacgttatcaatggcaaaacggatacgttgttagaaatctctgtattaccgttggatagctatgcgaagcctgatattgaagccaactatcagggccgactgctcgccagacaaagcggcttccttgatccagtgaactatcgtaatcactttgttaccatcctcggcaccattcagggtgaacaacctggctttatcaataaagtcccgtataacttcctggaagtgaatatgcagggcatccaggtgtggcatttgagagaagtggttaataccacctataacctgtgggattacggctatggtgcattctggccggaaccgggctggggtgcgccttactacaccaatgcggtgagtcaggtaacacctgagctggtcaaataacaccaccgaaagatgcagatgctttctcagcatctgcatcatgcattacatcaaattaatacacagtaagctaactattattattataagccctgtcctgttaattacctttggcaaactgattataaagttaatgtccgcaccaggagtcggttatgtttcttataattaccagggatacgatgttcttcaccgcgatgaaaaacattctgagtaaaggtaatgtcgttcatatacagaacgaagaagagatcgacgtaatgttgcatcagaatgccttcgtcattattgatacattaatgaataatgtatttcattctaattttctcactcaaattgaacgattaaaacctgtccatgtcattattttctccccctttaatattaaacgctgcctggggaaagtgccggtgacctttgttccgcggactatcactatcattgattttgtcgcactcatcaatggcagttactgctctgtgcctgaagcggctgtgtcactttcgcgcaagcaacatcaggttctgagctgcattgcgaatcaaatgacaacggaagatattctggagaaactgaaaatatcgctaaaaacgttctactgccataaacacaatatcatgatgatcctcaatcttaagcggatcaatgagctggtacgccatcagcatattgattatctggtgtgaatttcaggcttacggtgagtctggctacgctgccacacagattagctaattgaaacgcctttcacccctgccataccttttaataatcgcaacaggtcttctatcgacgttgtggcatgaagctggatatcaatggcgaccacttcatgatcttcattttcctgcaacgaaactaaatcagtttttattttttgctgcttaaaccagtcgagcattgataccgtattaccgttcactaatgtcagctgtaaatggtaatttttgttcatcaggcggaaggttaattgatggaagacttccagcaccaacaaggtcatcactgaaccataaatacccagttcgtacataccgctgccaataaccatacctatggcggcggtcacccagatatccgctgccgtcgtcagacctacaatattttggttacgaacgagaatgttacctgcaccgataaacccgacgcccgtcaccacctgagcagcaatacggctggggtcgagtccgacgtgatctaaagacagcacgtcagcaaaaccatatttcgaaacaatcataaacagggcgcttcccatgccaattaatacatgtgtgcgtaaccctgctcctttgccgcgcatttgcctttccatgccaatagcgccacaggcaattgccgcgagtataagacgtataataaattctgctgtcatataaaaatgcaaaaaggagcagcaagatggctcaacttgctactcctttttacttgcacctcattaattcggcaagtcattagatgcttgatttttgaaggtatacaaatttttctgcgggtttttcttacagtattcgatcactttaggaatttgagtgagatcggtttcatttaaagtaacggtatcgccacctttatatactgtttcttcatgcagcatccaccatgcaaccggggtcattgcttttggattcagatcaataaattcctggcaggtcatatctttagcggattcattggctgccaacgcagattgtgcgttcaccagtgacaaagccgctacagcgcccataaaaataaacgctttacggagagatgaaatattcattttgtaacccattcaatatagagattatatatgaacaggaggaatagctgcttttaaagaagatattccggcctgttcaatatgcaaggaagtacgatgtaacgcattcccggaattacatatctttcttaattttgtcccattcgcctttaactttatctttaaagttggcttgtttatcctgagtacaagcctgaacgatagctggggttacggttgcaataccctgaacatctaaaaccgcatcttctggtttatctttgttgttcagcgcttcagcaaaaccaactgcagttggctggaaggattcgtccacagccaggaaatcttcacaggtccaggagttgaccggttttttgttatcagctgctttttgcgcatccgctgcattgctcacaactggcagaagaagcagaccaccaagaataacgcctaatacttttttcatcgtaatatcctcaactataaagtgaaagagccgtcacgaatcaatttcgacactgaggttataacctggttttctgtatatgtcatgttgatggaaaatatcaaaatcagatatttttatttcaatacaatgagttacagatgcatcagatactgcaattaggaaatttttattaaatcgactgcattcttagacgcgtttttggcatagattgatagcaggggattttcttcttaattttatagggtggttctatgttatatatagataaggcaacaattttgaagtttgatctggagatgcttaaaaaacatcgcagagcaatccagtttattgccgtgctgctgtttatcgtcgggttgctgtgtatcagtttcccgttcgtctctggcgatattttaagcacagtagtgggtgcattattaatctgctcgggtattgcgcttattgtcgggttattcagcaaccgcagtcataatttctggccggtattatccggtttcctcgtcgcagtcgcctatttattgatcggctatttcttcatccgcgcaccggagctgggcatttttgccattgcggcatttattgccggtttgttctgtgttgcaggggttattcgcctgatgagttggtatcgtcagcgttcaatgaaaggcagctggctacagctcgttattggtgtgctggatatcgtcattgcctggatattccttggtgcaacgccgatggtgtctgtaacgctggtttccacactggtgggaattgaactgatatttagcgccgccagcctgttcagcttcgccagtttgttcgttaagcagcaataattaccccggttgtcacccggatcatagtcacttgatgtgactatgatccgattaatactctctccgctacgcagtgttgtagatcaattgcgcactatcattgaaataattacctgctagtgattatttcaacctactgaatttcatctaatttttttcactctatggcaaattagccatttcaaacattatcatggctgatattttccgtagtcaggtttaatgttttaaaagtgctgtgggaaagtgaacaaagagttccgtaagcgttgatgctatgggcggttaaataagtaatccgggttcatttttttgcaactggcgttgattacattgcataaatatccgtgtctccagacgctatataaaaacctgaagacatgaatgcgttatttactcaggtaatttcaatgcgttaaaagaaagctggcaatccaattgccagcttaagtcgaaacaaggagactcgatatttaaatcggattacattttaactttagtaatattcttcagagatcacaaactggttattgataacttattcttgggcagtaatccgcaaacgttaactttttgtttgctatttacaagctgataacaaccaggaatcttacttaggatcaatatatggagtgcgtgatggataaatctgaagtattgattagtgttaatagacgtattagttcacgaagggtaaagttcttataggcgtttactatattgaacaacgattcggacaaggatgtaaataatgaaaaggatgacatattcgaaacgataacggctaaggagcaagttatgatttttctcatgacgaaagattcttttcttttacagggcttttggcagttgaaagataatcacgaaatgataaaaatcaattccctgtcagagatcaaaaaagtaggcaataaacccttcaaggttatcattgatacctatcacaatcatatccttgatgaagaagcgattaaatttctggagaaattagatgccgagagaattattgttttggcaccttatcacatcagtaaactaaaagctaaagcgcctatttattttgttagccgcaaagaaagtatcaaaaatcttcttgagattacttatggtaaacacttgccccataagaattcacaattatgtttttcacataatcagttcaaaattatgcaactgattctgaaaaataaaaatgaaagcaatatcacgtcgacgctcaatatttcgcaacaaacattaaagattcagaaattcaacattatgtacaagctgaaactaagacgtatgagcgacatcgtcaccctgggtatcacatcttatttttagtcaggacataagcaactgaaattgatggctggcatgacgagggatgcagatgctgatttcattacccccggtgattactaaaggagaggctaaaacgactttattcccctggtatgtgtatccaccagtagaacccttcgttgcccgaatgctggcaggaactgttggcagaacggcaacattttttttgtcgttgacctcaccatgtcgatcactgtgcctgtatcccaccttactggctgacaaccccactatgccgctggtctgtaaatccctcatatctctcctcgcgcgcaatttaaagaaccgttatttctcaagaattttcagggactaaaatgaacagaagaagaaagctgttaataccgttgttattctgcggcgcgatgctcaccgcctgcgatgacaaatcggcggaaaacgccgccgccatgacgcctgaggtcggtgtcgtcacactctcccccggttcggtcaatgtgttgagcgaattgcccggtagaaccgttccttatgaagttgccgagatacgtccccaggtgggcggtattatcattaaacgcaactttatcgaaggcgataaagtgaaccagggcgattcgctgtatcagattgatcctgcacctttacaggccgagctaaactccgccaaaggctcgctggcgaaagcgctctctaccgccagcaatgcccgcatcacctttaaccgccaggcatcgttgctgaagaccaactacgttagccgtcaggattacgacaccgcgcgcacccagttgaatgaagcagaagccaatgtcaccgtcgccaaagcggctgttgaacaggcgacgatcaatctgcaatacgcgaatgtcacctcgccgattacgggcgtcagcgggaaatcgtcggtgaccgtcggcgcactcgttaccgctaatcaggcagattcgctggttaccgtacaacgtctggacccgatttatgtcgatctcacgcagtcggtgcaagatttcttacgcatgaaagaagaggtcgccagtgggcaaatcaaacaggttcagggcagtacgccagtacagctcaatctggaaaatggtaaacgctacagccagaccggcacgctgaaattctccgacccgacagtggatgaaaccacgggctccgtgacgttacgggcgattttccccaacccaaatggtgacttgctgcctggcatgtacgtcacggcattagtggatgaaggtagccgccagaatgtattactggtgccgcaggaaggcgtcacccacaacgcccagggtaaagcaacggcgctcattctggataaagacgatgtcgtgcagctacgcgaaattgaagccagcaaagccatcggcgaccagtgggtcgtcacctctggcttgcaggctggcgatcgggtgatcgtttccggtttgcaacgcattcgtccgggtatcaaagcacgagcaatttcctccagccaggaaaacgccagcaccgaatcgaaacaataacgttgcaggcttaaggggactttcatggctaactattttattgatcgcccggtttttgcctgggtacttgccattattatgatgcttgcaggtaattaataataaatgaacttaccggttgcgcagtatccgcagattgcgccaccgaccattaccgtcagcgctacctatccaggtgccgatgcgcaaacggtagaagactcggtcactcaggtgattgagcaaaatatgaatgggcttgatggcctgatgtacatgtcttcaaccagtgatgcggcgggcaatgcctctatcactctgaccttcgagactgggacatctcctgatatcgcacaggttcaagtgcaaaataaactgcaactcgctatgccttcattacctgaagcagtgcagcagcaggggattagcgtcgataagtcgagcagtaatatcctgatggtagcggcgtttatttctgataacggcagcctcaaccagtacgatatcgcggactatgtagcgtctaatatcaaagacccgctaagccgtaccgcgggcgttggtagcgtacaactctttggttccgagtatgccatgcgtatctggctggacccgcaaaaactcaataaatataacctggtaccttccgatgttatttcccagattaaggtgcaaaacaaccagatttccggtggtcaactgggtggcatgccacaggcggcagaccagcagctaaacgcctcgatcattgtgcagacgcgtctgcaaacgccggaagaatttggcaaaatcctgttgaaagttcagcaagatggttcgcaagtgctgctgcgtgatgtcgctcgcgtcgaacttggggcggaagattattccaccgtggcacgctataacggcaaacctgctgccgggatcgccatcaaactggctgccggagcaaacgccctggatacctcgcgggcagtcaaagaggaactgaaccgcttatcagcctatttcccggcaagtctgaagacggtttatccttacgacaccacgccgtttatcgaaatttctattcaggaagttttcaaaacactggttgaggctatcatcctagtcttcctggtcatgtatctgtttttgcagaatttccgtgccacaatcatcccgacgattgccgtaccggtggttattctcgggacgtttgcgatcttgtcggcggtcggtttcaccatcaacacgttgactatgttcgggatggtgctggcgatagggttactggtggatgacgccatcgtggtggtggagaacgtcgagcgtgtcattgcggaagataagctaccgccgaaggaagcgacgcataaatcgatggggcagatccaacgtgcgctggtcggtattgccgttgttctttccgcagtgtttatgccgatggcctttatgagcggtgcaaccggggagatctaccgccagttctccatcacgctgatctcctccatgctgctttcagtatttgtggcaatgagcctgacccctgccctgtgcgccaccattctgaaagccgcgccggaaggcggtcacaaacctaacgccctgttcgcacgcttcaacacgctgtttgaaaaatcaactcaacactataccgatagcacccgctcgctgttgcgttgtaccggtcgctacatggtggtctacctgctgatttgcgccgggatggcggtgctgttcctgcgcacgccgacctctttcttaccagaagaggatcagggggtatttatgaccaccgcgcagttaccttccggtgccaccatggttaacaccacgaaagtgctgcaacaggtgacggattattatctgactaaagagaaagataatgtccagtcggtgtttaccgttggcggctttggcttcagcggtcaggggcaaaacaacggcctggcgtttatcagtctcaagccgtggtctgaacgtgtcggtgaggaaaactcggttaccgcgatcattcagcgggcaatgattgcgttaagcagtatcaataaagccgtcgtcttcccgttcaacttacccgcggtggctgaactgggtaccgcgtcaggttttgatatggaactgctggacaacggtaacctggggcacgaaaaactaacccaggcgcgaaacgagctgttatcactggcagcgcaatcaccgaatcaggtcaccggggtacgcccgaacggcctggaagatacgccgatgttcaaagtgaacgtcaacgctgcgaaagctgaagcgatgggcgtggcgctgtctgatatcaaccagacaatttccaccgccttcggcagcagctacgtgaacgacttcctcaaccaggggcgggtgaaaaaagtgtatgtccaggcaggcacgccgttccgtatgttgccggataacatcaaccaatggtatgtacgcaacgcctctggcacgatggcaccgctttctgcctactcgtctaccgaatggacctatggttcaccgcgactggaacgctacaacggcatcccgtcaatggagattttaggtgaagcggcggccgggaaaagtaccggtgacgccatgaaatttatggcagacctggtcgctaaacttccggcaggcgtcggctactcatggaccggactatcgtatcaggaagcgttatcctcaaatcaggctcctgcgctgtatgcgatttcactggtcgtggtgttcctcgccctcgccgcactctatgagagctggtcaattccgttctcggtgatgttggttgttccgttaggcgtcgttggcgcattactggccaccgatctgcgcggcttaagtaatgacgtctacttccaggttggtttgctgaccaccatcgggctttccgccaaaaacgccatcctgattgtcgaatttgccgttgagatgatgcagaaagaagggaaaacgccgatagaggcaatcatcgaagcggcgcggatgcgtttacgcccaatcctgatgacctctctggcctttattctcggcgtgctgccgctggttatcagtcatggtgccggttctggcgcgcaaaacgcggtaggtaccggcgtgatgggcgggatgtttgccgcaacagtgctggcaatttacttcgttccggtctttttcgttgtagtggaacatctctttgcccgctttaaaaaagcgtaacgtgtaaatgagagtaaggttgaacatgaaggttcagccttactctttcctgctaaccattcaccactcaacaaccagctaaccgtcaggaataccaggcttagtacacagcactgaaagtagaaaccactccagccattcgtcatcaatttgaacaacacaatactgacccacattcccgtaatcgtatgaattgtcagcttaataatcccaaacatgccgagtcttttcctcctgaaaataccgataccgcctggcaaactgcgaaagagaactagccggtagcccggcagaaatcatcagggaagagtttcacatgaagcaggtgtgagatcctgaccaatattcaaatgcgaaatatgtcaggaaaaggtacctggcgaatgttgcgcaaactgatgtggcgttacaccataatattgtcgaaatgtgtttataaagtacgatgtactgctatagccacatttttccgcaatagtatgcagaggaatttgacgtaactcgagtaatcgtctggccatcgacatcctggaggcgagtaatattttactgaaacaggtattttcatcctgcaacttttttttgattagactctcgctggtatacattctttccgcgatatcgcgcagataccaacgtttggcgatatcaaagctaataaggcgttcaacttttcctgaaacagtgctgatgctattgaaaagtaaggggatcagttctttcttatgagaaaacatcgataaacaggaaaggtagagcatattgctcagtatcggtgaatttaccccggattcattgaagctatcaaaaatcgccgtcaccagcggcatggggggtgactggttaattaacaaacggtctttgctgtgtaaccctaaattgcgtggtagctgacgaatattttgtaagtaatggcaaactgtcagctcatcgatatccagtcgtcgcgtatccggtgaacaaaacgcaaaatcgtctgccaaatttttctccagcagcagaatactctcgttatgcagcgatattttttgctgttcatgataaatatcgaatgaacgacgaatgaggatcaccgagcagacatgagtcatgattatcccttatatttcatactgcgattatttcaatttcagtatactaatgaaatgatgccagactgtttcttagcgcaaaaactgccagatttggtaggaccaaaatttatccacaaagtagttttgcataacagttaattgataataagtaaatgcagcacgaatatattttcgcacagcgtatagcttatgtttataaaaaaatggctgatcttatttccagtaaaagttatatttaacttactgagagcacaaagtttcccgtgccaacagggagtgttataacggtttattagtctggagacggcagactatcctcttcccggtcccctatgccgggttttttttatgtctgagtaaaactctataatcttattccttccgcagaacggtcagtgccgtaaaaattcccttgcgcaacaatacttgccgccgagtcacggttcgacaatctctgcgccgatcgctcctgatactctgtgggcgtcatcccataataatttcgaaagacgtaaatgaaatacgacacgctgtgatatccacaggatactgcaactcgcttaattgaaaaaccatgtataacaataagttgcaaagcacgttgcattctacactcagtaagcaactgtgaatatgatgtctcttcttcgcgcaattttttctttaacagacttggactcatcaacagctcgctggcgattcgggctagtgtccactcatgggcgatattattattgataaccgtacaaactcgtgttcgcatgttcggttgtaaaacgttcagaagcagcggtataaagtgctcatcctcaagaaaaacagataacaacgcaaagattaatgctcttttacgtagcatttctgcatagcgaagattcttattctgcgatagttgcgcaacttcctgaaaaacaggaatatctctactacagtgatgaacgagtaatgaagaaacttttttatgtgcatgaagatttaatgcctcctccttgagcatcgggagaaataatgaaagcgtgtcccttgacacgaatacaaaattttcaacacacttatctactcgaatttggcttgcatccgcaaaaaccaggtcaccgccattaaaatagcgatattcaccattaaccatggtgagaatatatttatgtcttgcatacgcaattagacaattcccatgtagtgattgcatagttgacttaatattacataaacatattactgtttattaatgtagcacgccgccctcttaagtcaaattgattgataaataaatttaaacgaagcgggagaacaggatgataatgtgtgatgttctacgggcaggatgactggatttataatacaaaaacgtgtttaagaacacagggaaattaatagtaagcaaataatcccttttcgtgacattaaaggtaatcgctacatttaataaacattcatataacatatatcttatcaacacgatgaatagacagccaatatattattgcgattaataagcaaccgaatgcccagctgtttttttaaaggctgggcattcggtttttacaacgttatgttatcaggtgtgtttaaagctgttctgctgggcaataccctgcagtttcgggtgatcgctgagatatttcagggaggctttgtagtcttccagcaacagttcagcaaagtccatttcgaagccgcgacgacacataatgcgcatcaccacgatgtcggtggcttcaccgccgagagtgaaggccggaacctgccagccgcgcagacgcagacgttcagagaggtcgtacagggtgtatcccggatcttcaccatctttcagtttgaagcaaaccgccgggatgccttcgtccgggcgacccgtacagatgaactcatacggccccagtttggcgatttcatccgccagataagcggcaacctggtaagaggcgttctgtactttggtatagccttcacgaccgaggcgcaggaattcatagtactgtgcaattacctgacccgccgggcgggagaagttgatggcaaaagtaccaatttgaccacccaggtagtcaacgttgaacaccagttcctgcggcagcgcttcttcgtcacgccagataacccagccgcagcccagcggagccagaccgaatttatggcctgaagcactgatcgatttcacacgcggcaggcggaagtcccagacgatatccggggcgacgaacggtgccaggaagccaccgctggcagcgtcgatgtgcatgtcgatgtcgataccggtgtcggcctggaatttatccagcgcatcgtgcagcggttgtgggaactcatagttaccggtgtaggtcacgccgaaagtcggcaccacgccgatggtgttttcgtcacaggcttcaatcatgcgtttcgggtccataaacaactgaccggggcgcatagggatctcacgcagctccacatcccagtagcgggcgaatttatgccagcagatttgtaccggaccgcacaccaggtttggtttatccgttggtttgcctgcagcttccatacgcttgcgccaacgccatttcatcgccatcccgccgagcatacaggcctcggaagaaccaatggtgttggtgccaacggcctgaccatttttcggcgcaggcgcatgccacagatcggcaaccatatttacgcaacgcaggtcgatggctgcggattgcggatattcttctttgtcgatccagtttttattgatcgacaaatccatcaatttatggacgttttcgtcgtcccaggtctggcagaaagtggccaggttctgacgagcgttgccatcaagatataattcatcattgataatctgaaatgcgacatcatcgcgcatttcgtgcagcggaaatcgttttgactccgcgatagtagaaatggcctttgcgccaaaacgtgaatcgagtagttctgagcggaaatccgttaacagcttctggtccatttcgaactccttaaatttatttgaaggcaataaaaaagtaggatttatccgcaatggaagcaaggcattacaggcttaatttaaataacaaaatcctaagcagaaaaacgactttttataatataaacatttaacatgataatattaaaaacagactttattatcgtaataaaaatcgcccaaacattgctgttcgggcgatcaaattaattattgtttatcctgcatatacggcgtgtacaccccgttcagactgtgcaggaaagctacgatatcatccacatcctcctgcggcagctctttgcctacctgatagcgcagcatcagtttcaccgccccgtccagcgtcggcacgtcaccgcgatggaagtacggtgccgttaaagcaacgttacgtaaaccgggtactttctgacgcaatttatcacgctcttctttagtcacattcatacgaccaatatccgccgccgtaatttccccaaagttaaagtcttttttcagccccaacggttcaaaggaacgtccgccgagaataataccaccatgacaagttgcacatttattatctttaaataattgatagccttttttctgttgcgccgtcagcgcattttcatctccgcgcaaccatttatcaaatggggaatccggcgtaattaatgttttctcaaattcagcaatggcatcagtaatattttcgccactgaaaccttgcggatagacttcgaggaactgcgttttaagctgcggatctttttccagcttagcaataatttcgtcccaggatttcgacgccatttcaatcgggttcaacggcggtccaccagcctgatcctgcaatgttgccgcacgaccatcccagaactgctcaacgttaaatactgagttaaataccgtcggcgcgttaatcggcccaactgcgccaccaacaccaatcgatgtttttctgccatcgacgccccccgcattcaacgcatggcaatgagcgcatgaaatggtgctatcagccgataaacggggatcgtgatacagcgcaaaacccaacgccactttttgcgcatcggtaggcagtttttgcgggatgggctgcaccggttcattgcgatgttccggagcagtatcattgctggcgtaatattccgcgcgctgttttgcaatccaggccagtatttccgcccgctcttcatcactcaccttacccgcccagtgtagcgcggtataacgcgttggtggcatagtttcatactgcatcacccattcaatcttattcaaatcgctttgcgaaacgggtttatcagccagcagtgccgcacgcacggcctcaaggttaaaagatttatatccaagcttaatgtcgtaatccatcaactgtttcgcgccaggaatataataataggcgggtaattctgccgaaggcgtgtggcaatagtcgcatcctttttcgcggagaaagcctaaaaccttattattttcactgacagcagatgcctgaacatcggcctgtttactgcgtttattatcgtggtaccacacataaccagataaccctaaatagcaaatcgcgacgccagccaggccgatcgcggtaatacgtgagaccattttcattattcttccctcacggtggtgagttattgtgacccagaaaattttccagaatgctgcaaacgtctctgcgagacaaagccatcataaaaaacagggagatacgctttttgataggaatcaatcaattacatgaatataaactatcaataagatagcctgtgcctattacccagatcaggaatggcatatcatgattgcggcgagagcaggattgaatgttctgaaaatgaaaaacaacaccaaatcggtatttttataaattccattgatattagtgcgttatattttttgacaggttaataaacgtgatccaccgcacgctttgtcgcccaccaggcggagcgaatgactacccttaaagaaaagccgataattagcgacgaatttcggaggttggatccttatgctcaatcagaaaattcaaaaccctaatccagacgaactgatgatcgaagtcgatctctgctatgagctggacccgtatgaattaaaactggatgagatgatcgaggcagaaccggaacccgagatgattgaagggctgcctgcctctgatgcgctgacgcctgccgatcgctatctcgaactgttcgagcatgttcagtcggcgaaaattttccccgacagtaaaacctttcccgactgcgcacctaaaatggacccgctggatatcttaatccgctaccgtaaagtgcgccgtcatcgtgattttgacttgcgcaagtttgttgaaaaccacttctggctgccggaggtctactccagcgagtatgtatcggacccgcaaaattccctgaaagagcatatcgaccagctgtggccggtgctaacccgcgaaccacaggatcacattccgtggtcttctctgctggcgctgccgcagtcatatattgtcccgggcggccgttttagcgaaacctactattgggattcctatttcaccatgctggggctggcggaaagtggtcgggaagatttgctgaaatgcatggccgataacttcgcctggatgatcgaaaactacggtcacatccccaacggcaaccgcacctattatttgagccgctcgcaaccaccggtttttgcgctgatggtggagttgtttgaagaagatggtgtacgcggtgcgcgccgctatctcgaccaccttaaaatggaatatgccttctggatggacggtgcagaatcgttaatccctaatcaggcctatcgccatgttgtgcggatgccggacggatcgctgctcaaccgttactgggacgatcgcgacacgccgcgtgacgaatcctggcttgaggacgttgaaaccgcgaaacattctggtcgcccgcccaacgaggtgtaccgcgatttacgcgcgggggcggcctccggttgggattactcttcccgttggctgcgtgatactggtcgtctggcgagcattcgtaccacccagttcatccccatcgatctgaatgccttcctgtttaaactggagagcgccatcgccaacatctcggcgctgaaaggcgagaaagagacagaagcactgttccgccagaaagccagtgcccgtcgcgatgcggtaaaccgttacctctgggatgatgaaaacggcatctaccgcgattacgactggcgacgcgaacaactggcgctgttttccgctgccgccattgtgccactctatgtcggtatggcgaaccatgaacaggccgatcgtctggcaaacgccgtgcgcagtcggttactgacacctggcgggattctggcaagcgagtacgaaaccggtgaacagtgggataaacccaacggctgggcaccgttacaatggatggcgattcagggatttaaaatgtacggcgatgaccttctgggtgatgaaatcgcgcgaagctggctgaagacggtgaatcagttctatctggaacagcacaaactgatcgaaaaataccatattgccgatggtgttccccgcgaaggcggcggtggcgagtatccgttgcaggatgggtttggctggactaacggtgtggtacgccgtttaattggtttgtacggcgaaccataatatttttacagccagccgctaacttcctgctggctgtaaaattatcctcttcaggaggagatatttaacatcattgccgcctgggtgcgatttttcacttccagacggcgatacagggattccagatgcgcttttaccgttccggtactgatattcagcgctctgccgatctccttatttgattcgcccgccgctaacatggttaaaatctcccgctggcgggcgcttaacgatttgagatctttaatgtccttttccggcgtcgtccgccagtctccaggcagaaacatcatccccatcgccgcactatttaccgccaacgcaaatgtctcgacggttgaatcacgaggcacaatggccagcacattaaaatggataacttcctgtaaccaccgtttattgcaatccgtcgccgtaattaacaccttaacctcaggaaattgcaccacggttttttgcagcaaccagtagcaaaactcaccatcctgatcgccatcgagcataactaaggcttcagggtaactttccagcttttgccataactcgtctgcctgactggccccctgaatactcactcctggaatacgctgctgtaaactgattttcattccatgaataaatattgactgcctgtcaaacatgactatttgcataactgaatctccacctgaatacgttaaaaagacttaagtagtggaagggtattacccgcgagaaaaaataagaattcgccatttggcggtggccattctacagagatgacgtgtagaaaatagttaccgatataaatagttacagctaaacgcctgaaattacatgtcgagggcactatttaaaacaattttgaggatttccttatattggtggttagtacgcatgcaattaaaaatgaaattccgcgaccacaagccaaaataacaaacggcaaggagacaaaaataagcacaaatagccaacacgtcctctgttcactttaaagggaatcgctgaaaaatacgctctgtttaaggggattcacctttctcagaaagctattccgcccttttcctgctgagaaatcgccacattcggcatgacaacattgtgaaacccggcattagatgttagaaaaaacaataaacaatgcgatatgcgcgttactgtttcgctgtgaacaacaatcggtcaaagaaatggataaaattcacgcaatgcagttgttcatcaaagtcgcggagctggaaagtttttcccgcgcagcggatttctttgctttgccaaagggaagtgtttcgcgccagatacaggcactggaacatcaacttggcacccagcttctccagcgcaccacgcgacgggtcaaactcacgccagaaggcatgacctattatcaacgagcaaaagatgtgttgagtaatctcagcgaactggacggtctgtttcaacaggatgccaccagtatcagcggtaaattacgcatcgacatcccgccaggaatcgcgaaaagcctgttactgccgcgcctgtcggaatttctctatctgcatccgggaattgagctggaactgagtagccatgaccgtccggtagatattcttcatgatggttttgattgcgtgatacgcactggcgcgttaccggaagatggcgttatcgcccgtcccctcggcaaactgaccatggtcaactgtgccagtccgcactatctgacgcgctttggttatccgcaaagccccgatgatctgacttcacacgcaatagtgcgttatacaccgcacctgggtgtacatccgttaggttttgaggttgccagcgttaatggcgtccagtggtttaagtctggcggcatgttgacggtaaacagtagcgaaaactatctcaccgccggtcttgccggtctggggattattcagatcccgcgcattgccgtgcgcgaagccctgcgtgccgggcggcttattgaagtattacctggctaccgtgccgagccgctctccctttcgctggtttatccgcagcgtcgggagctttcccggcgtgtaaacctgtttatgcagtggctggctggcgtaatgaaagagtacctggactgaccgactatactttttaagaatgaccacgacagaaggacaaaagagcggatgacgcaggaaaacgagatcaaacgtcccatccaggatctggagcacgagccgattaagccgttggataatagcgagaaaggcagcaaagttagccaggcgctggaaaccgtcaccaccactgccgaaaaagtccaacgccaaccggttattgcgcacctgattcgcgcgacagaacgctttaacgatcggctgggtaaccagtttggtgcggctatcacctatttctcatttttgtcgatgataccaattttgatggtgtcgtttgccgcagggggctttgtgctggcctcccatccgatgttgctacaggatatcttcgacaaaattctgcaaaacatcagcgatccgacgctagccgccacgttgaaaaacaccatcaacaccgccgttcagcagcgtacgactgtagggcttgtcggcctggcggtggcactttattccggcatcaactggatgggtaacctgcgtgaagcgattcgtgcccagtcgcgcgatgtctgggaacgctcgccgcaagatcaggagaagttctgggtaaaatatctgcgagattttatttcgctgattggtttgttgattgcgctgattgtgacgctttcgatcacctcggttgccggttcggcgcagcaaatgattattagcgccctgcacctgaacagcattgagtggctgaaaccgacgtggcgattgattggcctggcgatttccatcttcgccaactatctgcttttcttctggatcttctggcggttgccgcgccaccgtccgcgcaaaaaagccctgattcgcggaacatttctggctgctattggttttgaagtgattaaaatcgtgatgacctacaccctgccatcgttgatgaaatccccctctggcgcagcatttggttccgtgctggggctgatggcatttttctacttcttcgcccgtttgacgctgttttgcgcggcgtggattgccaccgccgaatataaagacgacccgcgaatgccggggaaaacgcagccttaaaataggccggatgcggcgtaaacgccttatccggcatacgattttattcggcctggctccccgtaggccggataagatgcgccagcatcgcatccggctataatgcgcacataacctcttgaaactcgtccccagagcctcttcagccatctatttgggagcaaacaatttcattccaactcataaccccagcatataaatccagttggtaacttttatttaacctgaaaccagttttatccactatttataaaattatgtgaagcatttcatagaagaaaaatcactggcctaaacattatcccctttttgcctgatttttgaccatttccgcgatttgttacacattgaaatatcacttttgctgtgcgtaatatggctattcgttagccaaaaaataagaaaagattatgcaagcaacagccacaacactcgaccacgagcaagaatacacgccgatcaactcgcgtaataaagtccttgtcgcctctctcattggcacagccattgagttcttcgacttttacatttacgccactgcggccgttattgtgtttccgcatatcttcttcccgcagggcgatcctacggcagcaacgctacagtcgctcgccaccttcgccatcgccttcgtcgcgcgccccattggctctgccgtttttggtcattttggcgatcgcgttgggcgtaaagcgacgctggtcgcctcgttgctaacgatggggatttcgaccgtggtgattggtctgctgccgggctatgccacgattggtattttcgccccgctgctgctggcgctggctcgatttggtcagggtctgggcttaggcggtgaatggggcggcgcggcgctgctggcgactgaaaacgccccaccgcgcaaacgtgcactgtatggctcctttccgcagctgggcgcaccgattggcttcttctttgccaatggcactttcttgctgctttcctggctactgaccgacgagcagtttatgagctggggctggcgtgtgccatttatcttctcggcggtgctggtcattatcggcctgtatgttcgcgtgtcgctgcatgagtcgccggtgtttgagaaagtcgctaaagcgaaaaaacaggtgaagatcccgctgggtacgctgctgaccaaacatgttcgcgtaaccgtactgggtacgttcattatgctggcaacctatacgctgttttacatcatgacggtctactctatgacctttagtaccgccgccgcgccagttgggcttggcctgccgcgtaacgaagtgttgtggatgttgatgatggcagttattggttttggcgtgatggtgccagtcgctggattactggctgatgcctttggtcgccgtaaaagcatggtaatcatcaccacgctgatcatcctgttcgcgctgttcgcctttaacccactgctcggttctggcaacccgattctggtttttgccttcctgctgctggggttaagtctgatgggtctgaccttcgggccaatgggtgcgctgttaccagagctgtttccgacagaagtgcgttacaccggagcatcgttctcttacaacgtagcgtcgattctcggggcttccgttgcgccatatatcgcagcctggttgcagactaactacgggctaggtgcggtggggttatatctggcggcgatggctggcttgacgttaatcgccctgctgctgacccatgagacgcgacatcagtcgttgtaataagagtgaaaagcctgatgcgctacgcttatcaggcctgaatttccatacaatatattgaattcgcaaggatttgtaggccggataaggcgttcacgccgcatccggcatgaacaaagcacactttgccaacaatctaaatctgtttaattgccggatgtcagacatccggcaattatcatcacttcttcatctgcgacaaaatcgtccgacactgattagcctccccttcggaaggtgagatcagtgccagtaacgccgccgccggtgttaccagcgttgccagtgccgcagcaacagcaccacgggcaatcagcggtccggctttcaccccagcctgcggatttttaaacgtcccccgcacatacagcggcgaacgcagtgtgataatccgaattcctttactctccggatcaatagtcaaatccagctgttccgaagcaaaacttgccgtgccggtaacattaatcaacgcgttctcagtatcgaaagcaaaaatctgcgggcgcgccacgccgttggcaatattcagattcgccgccgcgcagttcacccgcacctcatcatcaccaaatatcgcaccgacaatgtagttgccgacattcagcccaacaatctccatcaggttgcggctcaccagcccgtcattcatcaacagtttcaggttgccgttactgttgcctaaaagtgccgccaccgagttaccgctaccgcgtagttccgcgtcaccgttcatttcccccagcgtcttctgcatcagttccacatcgggcatcagttctttcagtttcagtcgacgagcctgaatatctgcccgcccctgcatcggctttttatcgccttccagatgaatattcgccgcaatgctgccgcccgccatgccaaatttcagcggttgcaggcgcaggtcagcatttttgaggatgatatgagtagaaagatcgctaatcggcaggctactgccatgctcaatgcgccgccctttgaagcgaacatcggcatccataacgtcccatttatcggtttcgaagcggtcataaggcagcactttgcccgcaggctgaacgcttttttcgcccttcttctgttcagaccgtttcgacttttctgcccctttcccggaatcaacgccaatcaacggtcccaggtccgccagccgcaattgccgcgactcgacatcaccttccagttttggtcgtggctttccggtggtgtagaccagagaaccgtggatatcgctatcaccaattcgcccattaaaaccgcgataatcaaagaccgacgatttttcagtgtcgattttcgctaccagccgaccatccgtttcaaacggcggggtatcgggcagcagaacgcccgtcagttcatagagatcacccagtgaatcgccagaaaatttaagccgtaaatcgacaccgcccatcttcattgggtcattcacgacgccatcaaaagcaacacgggtgttaccagagcggaaatcagcctgtaccggaaacggcgtcccttcgccacgcagcgccagcataccgcctatttttcccgtacccgtgagcggttcaccgttatatcgtccctgcgccttcaggccaaaaacgtaatcgcccaccttttctttatccgctttacctttcgatccagtaacttcgctgaacggcagcggcttgcctaagggatcaacaaaaatctccagatccgctttgcttactttgtcatcaatggcgatccgcccttgatcgaaaagaatattatccagccgaaacgaccatgccgacggctttgcattcgcgtctttgttatcatcgttggcaagattaaacgtccagttattgttcttttcagagaggcgaatcaggcgcgcgtcgggcttttcgagcttgatccacggcagccagaccgttttggtcagcagcgccagcggggccagcgttgcctctacgcgtggcaaatgcaccatcgtgacttcgggaatatccggtggattgccaagaatgatgtcttccgcgtgtacatggggccacggcacccagctgcgccagccagtttcttgtttttgccgctcccacaccacgcccagatcgccacggatagcgaacggacgattcaactccgcagagactttctggttgatagtcggtttgagtcgattccagtcaaaagttgcaatcaaaatgatcgccacgacaatcaacaacaagaaagcccctgaaatcgcagcggttattttgcctgccttgctcatcgttcgcttcctcatattcttcctgtgccagtcctaaagatagtccagccaggcggaaaatgaggcagcttatagcgccagaaccgccgtattcagcgtttctatcggtgccgggcgtgaaagaaaccagccttgtgcggcgaatgcgggcgagttctgaacatcacgccactcttccggcgtttctacgccctcgacaatcaccccgcgacaatagcgattcattagatgtaaaagctgagaaaagagtgtgcgtccttccggcgactgacgcagcatcacaaacagttctcgcgcgattttgatgtagtcataacgcacttcacttagcgcagagaaatttgccatcccggtaccaaaatcatccagccacagcgggccaaattcacacatcgaggcaaaggttgaatctttcggcagacggatatgctccaccagttcgaaacgcagccagggaagacgctcaatctggcgcaggatttttggttgctgacgcagggcgatgagcgtagggccatcaatattgaccgatgccagcaggccgtgctctataaagaagtcggctttttgcgccagcaaatcaatctgctctttcacaacctccatccgatggctgacggtgatttcagtaaaatagcgatccggcggcaggcgttgcgaagggttcaagggatgcgtgaccaccgttaatagctccacggccattaaccgcccgcatgtttgatagatcggctgccaggtgtaagcacgctcacactgcaaccaaaaacgccgttcctgcaagctctcgatgcttgcttcagggttgcttattcgctggataacctgccttatcatcaaagatgtcctgtgtttaaaagtgatgctgcccggactcgacaaagattatcggcgcgtaagggcagaactttaccgcctggccggggtaaatttcctcactccacaacggaatctttcaggaatacgttctggctcaaaaaaataatggaacactgttttaatatggttgaccagcaaaccaccacagcgcaaactaacgctaattttttacagatcaggttcacgactatgtccaaaaagattgccgtgattggcgaatgcatgattgagctttccgagaaaggcgcggacgttaagcgcggtttcggcggcgataccctgaacacttccgtctatatcgcccgtcaggtcgatcctgcggcattaaccgttcattacgtaacggcgctgggaacggacagttttagccagcagatgctggacgcctggcacggcgagaacgttgatacttccctgacccaacggatggaaaaccgtctgccgggcctttactacattgaaaccgacagcaccggcgagcgtacgttctactactggcggaacgaagccgccgccaaattctggctggagagtgagcagtctgcggcgatttgcgaagagctggcgaatttcgattatctctacctgagcgggattagcctggcgatcttaagcccgaccagccgcgaaaagctgctttccctgctgcgcgaatgccgcgccaacggcggaaaagtgattttcgacaataactatcgtccgcgcctgtgggccagcaaagaagagacacagcaggtgtaccaacaaatgctggaatgcacggatatcgccttcctgacgctggacgacgaagacgcgctgtggggtcaacagccggtggaagacgtcattgcgcgcacccataacgcgggcgtgaaagaagtggtggtgaaacgcggggcggattcttgcctggtgtccattgctggcgaagggttagtggatgttccggcggtgaaactgccgaaagaaaaagtgatcgataccaccgcagctggcgactctttcagtgccggttatctggcggtacgtctgacaggcggcagcgcggaagacgcggcgaaacgtgggcacctgaccgcaagtaccgttattcagtatcgcggcgcgattatcccgcgtgaggcgatgccagcgtaaacgcagcatatgcaaaaggctggataaagtgttacccctctatccagctcatccataaatacctgatggttgtgctaactcatcaccatcaggcattactgtgcaggtggaatatccgtcacttcaggatgtacgtcatccgtggcgacagaggtggtcgcagcggcggtagatggggccatgatttgatcccagaccgcctgcaacgctttcatgttaaattccggctcgcctttcggctgcagcagtattaacgccatatcattcgacaactgttgacgcagatcctgatttaacatctctaccgtcaggctattaaggaaatcctgccgcagtttctgatattgctccggcgcgatatcgacaacctgattttgcaacgaacgcatccgctgacccatcagaatatcggtatcagctcgtgcataggcggcaaacagtttctgcagctccagtttcttttgcgccactaacgcattgaactcttcttccggcagacctttatcgcgaaccttcgccagttcacgcgccaccagattaaggttgctgttcagcttgtcgtttggtgattcgatgttgatggcacactgcgcacgcagatacagcacacggcagtcaaatccaagaccgatgtctttgctgttactggcacttaacgcttgctgaacatgccagaacagcgcctcgcgggccaggtccgcacgccagtagcgcagcagtgcggctgattcacgaatcggctgccacggcgtatcccacatgatagataaccggtcctgacgcaccgcgtcagtcataatactcaccgcttccgcacgcagcggagaaagcgtcggcaccggagctggcgtttcacgtttgcctttcagttcgccaaacgttttgtttatttggtcgacaaccgagcgcgcatccacgtttcccaccaccagtagcgtcattgcatccggggtgtaccatttctgatagaaatctttaattttttccgcttcaacgggttgtttcagcggatcggcaggatcgtgacctaacaaggttgaccctttcagacgatagcgccaccagccctctttagtatcggcaggccaggttgccaccatgtcctgactttgcagcgcgtggttgatggtttctggtgtgatggtcaatttgccagtggcatttgccagataagagagcgcttctttcagcaaatcgttacggttattgggcaaactcagattaaacagcgtggtgtcataagagacaattaccggcggcatcgggcgtttagggtcgatcccctgctgccacaatgaacgcgcctgtgctgcgtcaaggccaccgctttgcgttagcgcaatacgagggatggcgtgactgtaaccgctctgttgtgtactttcggcgagcgaaccggtattaaccagcaggcgaatttcaacacgatcgctgggacgctggggggtggtcagcacttgccactgtaaaccgttggaaagcgtcccctgttgccatgctggatcaggctggagcgcatctgcctgcacatagccagcagtggccatcatcagcaaaccgcccgctaaaagtcgaatttttgtgccctgcatgtgaacccctgatcaactatcctggtaataaaaaaactgcccgttgtcggtcagtctaaatgacgttaaaaacacttcgtgttagaccgcaagaacatgaaaatgtcacggaagaagtgaaataaacctgaactcacccaggtggtaagttcaggcacaggggtcaattatgcgcaaacacccgcactcggggaagggagtgcgggcataagtgatgagattaagaggataattcgtgcgttttgccatccggcgcacgattattcagcacatcgtccagttttttgtggtccagttctttcacccacttagcaacgacaatggtcgctacgccgttaccgaccaggttagtcagcgcacgagcttctgacataaagcggtcgataccgaggatcagcgccagacccgctaccggcaaatggcccaccgcagagagcgtcgccgccagcacgataaagccactacccgttacccctgccgcccctttagaagaaagcagcaacacgattaacagcgtgatttggtggacgatatccatctgactgttagtggcctgggcgataaacaccgccgccattgtcaggtatatcgatgtgccatcaaggttaaacgagtagcctgtcgggatgaccagccccaccaccgatttacggcagccgagtttctccatcttgtcgagcatacgcggcagcgccgactcggaagatgaagtccccagtacaatcagcagttcttcacggatgtagcggataaatttgaagatactgaaaccagtcgctttagcgattgaacccaataccagcaccacaaacaggatacaggtaatgtagaaacagataatcagctgccccagttgcaccagtgtgccgacgccgtatttaccgatggtaaacgccattgccccgaacgcaccaataggtgccagacgcatgatcatattgatgatgccgaagatgacctgcgagaaactttcgatgacgttaaaaatcagttggcctttgctgcccagacggtggagcgcaaaaccaaacagtacggcaaacagcagcacctgcagaatgttaccgctggcaaatgcgccaatgacgctcgccgggatgacatccataatgaaggcgacaatgccctggtctttcgcctgatcggcgtaaaccgctaccgctttcgcatcaagcgttgccggatcgacgttcattccggcaccaggctgcacgacgttaacgatgataagaccaataatcagcgcgatggtactgacaatttcaaagtaaagcagtgcgactgcgccggtacgaccgaccgccttcatgctttccatgcccgcaatgcccgttacgacggtacaaaagatgacaggagcgatgatcatcttaatgagcttaacgaagccgtcgccaagcggtttcatttgctcgcctatttcaggatagaaatggccaaggagaataccaatggctatcgctgtcaggacctgaaagtaaaggcttttaaacagagaggttttcatagggtgtcctttagtaaaaccacaggtcttgtaaggttatggggtacctgcggccttaaaataacacccagacaacatcacagaaatgtacctggatcataattgaaacaaaaaggttaaaaagtttgagctggctcgcacaaaccagcactttttaaagttttgtaatcagtttggggtagctacttttcttccaggtaactctcttcgaagatttcaatagggagtgggcgagcaaaaaggaagccctgggcaataccaacgcccgcttttgccagccagtcgcgttgtgcttcagtctccacgccttcggcaatcatttgtaagttcaggctctgcgccagcatgataattgcagcaatcatgctgctatctcccggcaagccttcaacaaacattttgtcgattttcagtacgtcgattggcaacgatttcatatgctgcagctgacgcagccctgcgtagcccatgccgaaatcatccagcgccacccgaactccggcattgcgcagcggacggaggattgccaccgcagcatgagggtcgtcaatacgtcggctttctgtcacttccagaatcagtgttcccggctgaatgcgatagcgggttaacagttccagcatatccgccaccatattcgggtgcatcagttgcagcgcagagaggtttaccgacaagggcagcataatgccgcgctcttgccaggctgcaagcaatcgacaggactcttccagcacccagtgaccgacggtaaccatcagcccacagcactcaatgcgatcgattaagccatccggcaggtcccaactgccatccggttgctggatacgcagtaacacttccgcactgaccagtttaccgctggtcatctcgacctgtggctgtaaccaaatagcaaactgatgattttccagtgcattaaggatatcgctctcttccgtcaaccgcttctgggcggcttccatctgctgcggatcaaagaactgaatctgattcttgcctttatggcgagcggtaaatgccgcagaaatagcgcgactgtaaagctgttcggcggtgagatcgccgtagaacatcgccacgccaatgctacagtgcggacggagttgaatacgttcaatcggcaggcgctcgctcatgatagtgagcacttgctgacctaaggtgattgcgtgccacggttcctgtacaccgttggcaatgacagcaaagtcataaccgctaatctgcgcgaggatcatacgtggcgacagtaccgatttgagtttttccaccagcgtcagcagcagaatttctcgttgcgcctctttcagcacgcccgcagtatcacgcagggtttcacaggtgatgatcatcagcgcggtggtttgtttacgcgcgacaacctgctccagcatctccatcagcaaggctttgttcggcaaatccgacaccgggaagcgcatcgcattttcgttctgttcttcataatggcgctgcagcaattgctggttgaggttgtaactgcgcaccaacataccgatttcatcgtcctgatgcagacgcggtaatgccagttggtgaccaacaagctccttggctgggatggcgttaagttcgcgagcaatattgcgtaacggatgcaaaatcaggcggttaatgcaccagctgatggcgacggtcaggataagcgacaaaagtaagtaaatggtcactaacgttgagagggtgctcatcacgaacttatacatacggaaggaatccgcctgtagtaccagataggcaattggctgcgggtttgccggacgttcgagcgagtaaacgcccagcgagatttgaaccggtagctcaaacaggcgagtaaccattaccggcaccgggcgctctggaataaaacttttacgcagcgcctggaactggttaggcagcactacatcggcacggctgaccacgcctgccggtttaatgctggcaagaatagcttccgcttcgggaatatcgcctttcaaaatagctgaagataagggttcgcggacagagcgagcaatgctttccagttgcgtagccgtgttatagcgattctgctggaccagatggaacagcaaaacggtgcaaaaaataaaaacgaacaccaggacaacggctgccaccattgccatctgcttgattgttaacgagcgacttacgcgcaaattgtctccccccggaaatcccagattgccgcccgagtatacccgatcgcagcggcattaagagaggcgctatctgaaaacttaccagtcggcgtaaggtatcagcggctgcggcggtaaatccatgtcaccctgccatccggcggcggaataacgtacgtagagcaggaaatggctgggtgcgtaatctttcgcctgctggatatcaattgccgtgccaacaaaccagttggaagtaacacgtcgttcaagtaatgcccgcgccgtgtagccgaagccctgactgctgccgccatcgttggattgccgcgcagcttcttcctgccagtcggtcgggatcagattcatcagcggataacgcggcatggttttggtgcgtgaatgcgaccacgagccagacgcacccagctcccacgaccagttttccgtgcgctcccgccacatcaccggtatggcaaacgacaggtattcctgcggactgtagtaaccgccctgaccgagtgagtagccactcagatctttgtcgtaatgccagatcatgttgttcaggccgattgtgacgcggcgattgttctggttaatgaccttatagtaatagcccgtcatccagcgcacgcgccagttatcttcgacatttttaccggttaactggtcgccactaagcgatgcccagacgccgtttgcttcacctttatcgtagctcagacttagccccacaccgtcggcacgtacgccaccccattttttcccggtattgctcggggagtctttttgcccaccaaaggccagcaaagaactggagatgggccgacggtgggcgttaacggtgtaacccagcggcccgatatcatcgctgtaactgatgccgccgaccacatccaccacgttgaagcccatcggcgtggtaccgatatcccagctccagacgtcatttcgccagccgaccgccacgctggcaccggaatccgactggctgcggttgccgctacagtcctgtaatgtacaggtgccccagttgtcatcccatttgccatcggcattagtggagaaactgccgacgttcatattgacgaaatcactgcgaaagaacatccgcccgtcagaatacggcgcatccacctgcaacatggtagtgtgcgctttcagatcggagtaaccaccggtgccgctcgaaccccagtaatcgtgctcaagggtgacgttaagatcctgctggcgatagaggtccgccgcatcgctgcgcacgccacgtttcagccagtcatctttctcgtcgttacgggtcagtcgggtaaaggtgtcgttatcctgcggacgcgtcgtagtcacaccggatgcgaccatggcgtctttgtaggtttccagcgcctgcgttggatcgcccgcctgcgcttcaaacttcgcaccatcacgcagcaccatcgcgctttccatcgacggtggctgagattttgcctgcgggatcaacttattaaacgtccgctgcgctgctgcggtatcgccaagctgcgcctgtgccagcgccacgcgccgctgtgtgttcagcgaggcgttatcggtagcgggcagtttcgccagctggctacgtgccgccgctttgtcaccggcagcaatatccacttccgtcagaccaagaatggcgtcggcgttagctggctcccgcgtcaggacattctgatatgcagcgcgggcggcggtgtaatcacgtcgttgttgcgcccagtcagccagcgtgaggtcaatacgcgtggaaggtggttgctggcgcagcatcgcttccgcttctgcctctttgccgctttctcgcaggcggttagcggtttccagcacctgatcgctttgcagtcgattaaccagctcctgaatattgctgttccactgcgcacgcggcaggctattgatatgcgccagcgccgctctgtcctggtcatgaccagagaggtacagcccgtaagcgtaaacctgctccgggtcgttcgacttctgctgcgccagattgcgcattaacgtatcggcctggctgcgttgtccggcctgccagagatcctgcgaaagtcggtaagtaatccatacgctgccggggtccagcgccagtcgttgccgctgaagtgctgccgcctgcgcccatttgccctggttttccagtgcctctgcctgctgtgccagacggtcgttttgcaggctgcgttcgatatcatcaatgctacgccgctgactggcagagagcgaggcgataaacgcttcagctttttctggcgattgctggcggtaaatatttgccagcccgcgcacggcgttagtgttgccgctgtccatacgcaaggtctgctgataataacgttcggcggcgggataatcttttcgcgccatcgccacatcgcccagccccagcactgcataactgtcggtgttatcgacattacgcgcctgctggaacaggcgttctgcccggtcaggattattggctttcagcgcagcatcgccctgctggatcgccagccagtagcggtttactttcagcagactgttccatttgtcgttgttgctgctgtgcgggtccagtgcgagggctttttccagattcgccactgcattggcgcgatcgcctttctgagaatacgcctggcccagcgcccccagagcttcactgtctttcgggttcgcccgcaccgcctgttgtagttcgggaatggctttacccgccataccagagtccaccgccgctaaaccttgcgcacgagcgcggaaagcaggatcggccagctgtttttgctgttctgccagttgcgattgcgcagccgccacgctatcgccatcactaaagatcgagagatattttttcagcgccgacacactggcatcactgacgggcatgtctttaatctgcccgtaccagattttagaggccccttcgcgcccggcgttcgattttgccatctgttccaggacggcaaaaccttcgtcacggcgatcgctactaaacagcaatagcgccagattgttttgcaggcccgtattgcccggtgcatccgcattgatgcgttttaactgattaatcgcttcgccacggcgagccggaattttcgccaccgtactccagtactcgacagcaatgtcaccttccggcggcgcaccgttgaacagtttgttgtaactcgccacagcttcttctgcatgaccggtcgtcgcctgcaatcgtgcctgttgcagtgcctgacgaccatccggcgtggaaagtagcatcgtagtccgcgacgatttatacgcatttgaactcggcgctaactgcgacagccgatcgagctgtttttgcgcgccatcaatatcgccctgacgtaacaaagaacggaaacgggcggcaacgacgtccgggttattcggatcaataagttccagccgatataacgactgttgcaccagatcttcacgatgggtcgcttcgcctaaccgaacttgctccagcaactgttgctgagcggttggtgctgcctcgaccatcggcatgacggccagaccgagggaaagcgtgaatatgtttagtgtgaatttgcgcattcctggccccagtcaggtaataactcaccttttgtcgagaagcggaaacggtgttgatcccagccttgtccaaacagggtcagcacatagttgtaataggcatcgctgccgggaaagttatcggccacgcgctggcgctgaacggcctgcgcatcgcggttttgtaaaaagggcagcatggcggcagaaaaaccgactggtcctttaccctgcgctttccccgtagccacatccactttttccggcggataaccgtttttctcagtgaatgtcgccatcggtttaaaccggttgagcatccgcgctttttgcggatcgctgtcaggcatcatgcctacccacatgtaaacgcggatagcgtcgtagctgctgatcaatgttttttcggcttttagctgccagcctttgtctttctcatagcgcacccagtctggcgaaaaacctttcggggcggtttccagcaataaacgttgattggtttcgcgcagcgtggtccacggcgcgccaaagcgggtgaaatactgcgccagcgtcggcggcaggtagctggggttaaaacgccagctgttatcctcagcaaaacccactttgcccggtaacaacatggaacccagcccaggcaccgtcaccacttcctcccgcgcgatacgttttagcaacgcgctgccgatgtcggtataacgctgctctttccacaaacgccccgcctccagcaacgaccaggccatccagacatcaccatcggaggccgaattgctgtccagcacttcccacttactgttctctttcttgccccacagccaggcgggcaaacgttcttttaaagaaccctgagcgagattgttctgcgtccagtcgagaatattatcgaaagctgcacggtcgttagccgccagggcagagaacatgccgtaactttgcccttcggaggtggtgattttgcgcgcgtcgctggggtcgatgacgcgcccttcctgactgatgtaatcctttttaaactgctcccaggcaggccaggtacaggctgcctgaacactaaaggcagccagcagcagcatcgtcacgattccactacgcaacacattcatcttcaattactcgttatccgggttaagacgacgacgactaataattcgcagcagacgccacagtacccatgccagcaatatcacactgatagccgccagcaccgccagcagaatcggatggtttgccagcgcataccacacgcgctcgaaccacggcagatgacctacgtaataaacgtcgccaacacgtaggctgttgataccggactcgcggatcaccgcgaccgaaccgaacatggtggcgcgtttgccgctatcgttcaccgcatcgttaagcatttcataaccgcgtgggctatctgccaacagcgcaatcacgctgcgctggtcgttatacggcgactggaagccaatcaccgccgccatcgcaccggaagaggtcagcgttgaccgggtttctgccgcgcgatcgctctcgtccggcacaatgccggggaacggggtctggcgcatcggtgttttcacccagctttcggtcgcctgcaccaataggtcgatctgcttatcgtctttcagtttgtccgggataccaccgatgatcatgatgtcggcatctttgccctgaatggtgctgccatcatcggtcaccgtcagattaatcgccgggaagcccgtctgtgcgccgataaaaccaacagtattcagcaacgtttccatctgtgcttcgttaggcgctttcggcatcacggtgatggtttgcgacagatccgccatccggctgaatgggaagcccgcgttagcaaaggcgcgtagatccggcatcgggatgaagtggtaatacttcgagaagtcgatggtggagtcgtcaccaatcaccacatgattctgcaccggctggaaggtaatacagttatccaccgaaccgcccggcatcgggttcatatactcaaagtcgaagcgcagctggttggtcgcgcccagtttcagcgccggaatagagacatctgttttgccatccagcaaaccttgtaataccggaatccgcagcagcaggcggttcgcctcctgtttgctgctcaggttgaaggattgcaggaactggttattcaggctgatatccatccgcgaactgtctttcaccggcggcatggtgtagcggtaattaatatccatatcaatgccggtactgcgcatcaggtagagatccggcggcaggtttagcgaaacgttaatcgctgctggctcaagaccgctggattgtaactgttcttcataggttttcagttcgccaaatgtgaccggacgatcggtacgtacccagttcggcgcatcgtacggcttacgcggtagcagcggtttcacttcattcactaccacgctttcaccacggaacagaatgttaccctgagcgatacctttcgctgcctgcaacaggtctttgtcgtcacgaccaaacaccaccagcagtttgacgtaaggattctgcggatggttaatcatctcaatcaccggggcttttaccgccggatgatcgcgcaggaagtccggccgtttgtcgttggttgcaaagacaatggcattgcgatccggcagttggttatagagtaccgggaagttctgcccacgccagccagaacgcgaaccaaaccacgaggcgacaatggcagaggcttgttgcagcccaacatccggcgcacccgcaaagaccatcggcaaggtgttggtgcggttatcgctcgggtcaaagaatggcaccgggaagtgtgacaggtcattcttcacattcagggtctgataggtcagatccagtccactgctccgcccaacatccagccaaagcgtggtgctggccggtttttcgcacacgtcctgataatggccgacaaactccagccgtacacggttgaagtcgctaataaacagtgggttaatgggcatttgcgccagcgtttttttacccaactgttctttggtcactggcagcacgcccatcagttcatcattgagataaacctttaactgcgactggacaggcagtaacgatggcgatggggtgtattcgaggttgagcatcgccttcgtcaccacttcatcgctgcgcataccaaactcaatgctgccgttcgggttaatgccacgtagcaccatgctgcccggcggcggtgcaatttgcgcaaaggtcagcttcacatcacgcgaaggaccgttctgcgccacgactggcgcatcagcgccctgcacgcccggcatcacttgccccacctgcggattttgttccgtctgggcggctacagctggctcagcattgatcagtggttgcgttgctggcgtcgcctgcgtcatgaaagaggggaacgcactcatccccatagccactgcacaaatccagaatagttttcttttcatcgcgttatcatcattgttgagccaaagcctgatccgatggttgtgccgtttcgctccgctccgggcggcgcggaataaacgatacaacccaggaaaccagagaagtcagcacacggaatatgcccttcaccgaagaaggcgcaaactccgccagatggcggtagccacggaagccgagcttcagaatatccagcagactttccagcggcttatcttccgggtagctgtcctgccagagcgcccatgtatccgcacgggcaaacgtacactgcacaaaatcgatatgttgctgggtggtgagcggcattaatttcagcccaacttcattacccatcacgcgcgccacctgggtcgggaagacgtattcctgctgaccgcgtttaagcaacagattcactttctgcccttccagaatctgcgcctgaccgttgatcttgatccccaaaccaccgtcggagaaatcctgaacggtacacgagaagaggtgaccatcttcgcgggcaattgccgcgggcatcgtcatctccacgcggtgcgatcggcgtacctgtttgctttctaccgataccgcaactgcgccgccaagaacaatcaggttgtagaacacccacaccatactgacgaccacggtgagcatctcggttggcgggccatagaagtagcgccagatgcctaccgcaacgcccaccaggttgagcaggacaaggaagatgtagggccgcgagatcacccagtcgacgtactcttcttccaccagtccacctttggcggtgacgttaaatttgcctttgtgcgggttaatcagcgccaccagcgtcggtggtgcgatataccacgccagcaccgtttcgtagatttcactccagaaagagtggcgatatttgccctggatcttggagttggtcaggctggcatggatcatatgcggcagcacgaatagggcgatcatcaacgctggcgcatagatgatgtaggcatgaagcagcaggaacgccagcggcgcagtcaggaagatcagccgtggaatgcccgacaagaagtggaacatggcgttgacgtaacatagccgctgagcaaacttcagccctttaccggtgagcgggttatcgagacggaagatttgtaccatcccgcgcgcccagcgaatacgctgaccgatatgcgccgacagactttcggtcgccagccccgccgcctgcggaatacgcatatacgcggaggtatagccacgacggtgcaaccgcagagaagtatgcgcatcttcagtcacggtttcgacagcaatgccgccaatttcatccagcggcttacgacgaatcaccgcacaggaaccgcagaagaaagtggcgtcccacatatcgttgccatcctgcaccagaccatagaacagcgtgccttcgttcggcgttttacggaaacgccccaggttgcgttcaaacgggtccggtgagaagaagtggtgcggcgtctgcatcatcgccagctgtttttctttcaggaaccagcccatggtcatttgcaagaacgatcgcgttggtacgtggtcgcagtcgaaaatcgacacgaactcgcctttggcatatttcagcgcattgttgatgttgcctgctttcgcatgttcatgagtggtgcgggcgatatatttcacccccacgttttgcgcaaactggcgaaactcttccctgccgccgtcatcaaggatccagatattcagcttatctttcggccagtcgatacccagcgaggcgtaaatggtatttttcaccacgttgagatcttcgttgtaagtcgggacaaagatatccaccgacggccacagcgacatatctttcggcaatggcaccggctgacgattcagcggccatactacctggaagtagccgagcaccagcacaatccacgcgtacgtttcagcgaagagcagaataagcccgcacaccaggctgaccggatcgtcccagttcagcgtagaggtgtaacgccaccagatataacggcaagaaacggtcagcgacagcacaatcaacattagcgccgagaagcgccccggcatccgccgtacgatcagcgctaccccccacagcagcatcaggaagataaactgcgccagcgggttaaacggctgagtaacgcagattaacgccagaatcagcgagaaggtgacgatgataccgaggatcaaccgccgcgccccggcactcaaatgaccgagctcttttttctcatccagatgctgtgttttatggctaacgcgctcaggcagctcgttcatccattgatggtaacgtccacgaatattttgcagacctgaaaatgcccgcctgcgcggtttcggcgtttctttgcgcgatgcaccgatcaataaccagcatgtttgaatgagataacggaccgggtccagcggacgcggacgcgaggcgttgatatgcggatacaggtttttatgttctgcgcgaatacgctgccagcgcgggtgctccagcggaataaaaatccaggccaggatcatccagaaacagccgagcgtcgcgctgaaagccgacgcaccgtgacgacgataatcgcgataacgcccgataagccgcgcgttgaccggcgggataagcaaccaccgggtcaggatactcatgatgcactcccgactggcgttttcagcccggagtagttcaacaggcaccagttcgccagcgtcagtatctcttcagccgccagcgcatcactgcgatattcacctactggttgcttagccgccaggcattcagccatcgcttcatcacgatgaatgagcatcggcagtaatcggcgctggctttgcaaccaaagctggtaaatatcgtcctgaacctgactgccaatacggaagtcattaatcaaaatatgtgcgccatccggcagcgcttgctgatgcagtcggatatggcagttggcatccacattgacgattgccagcgagtgatcgcacaaactcagcagctggtgggttatctgcgaggcatcacgcggtaagtcgattaaaatccactggtaacgcccgctggcttttagttgctgtaagccggagcaaatatcgctcagccgggtttgccagtgctgtggattttcttgttcttcaatggataactgaccaaaaggcagcaaatcgagctgcgaggtgtagcgcaacccagcgtcacgccagtcctggccatccagcatcgctctggcccagccctgacggtgggtaaaatcaacattaaatgacaggcgcaacaagttgtccgggcaggcatcgaccaccaggacattttctcccaacatttgtaatgaccaggctaatgcggcggtgatggttgttgtccccacgcctccccgcaccccctgctatcccagtacggccattcaccaatcccctacttttgttgcgcaaactctgccagcaacggccagcgttttaatgccgcggccaactgttcgcgttgggaaatatcggcataatcaatatcaggcagtgaaaatgcctgctttaacgccacaatatcattctggaagatatagcctatcgcgggatcaggcagagtatctggttcattgttattcattttgcttgatccctatgaaataaccgtaccgttcatgagacaattctaaccgtgagcatttcgccggtttattgtttacggcgagacgggaatttgctcactttttgactttccgttacgcaacagaaaaagttaaaaacgaaaagactaaaatcacacgtcttgtgaccttctaaattgattcacatgctaaatctgataagttttaatttcaatggtaggtttatttcttagctttcgctagtaaactgataatcagacaaaatggtgacatgagggacattgtggaccctgtattctctatcggtatctcatcattatgggatgagctgcgacatatgccagcaggcggcgtctggtggtttaacgtcgatcgccatgaagatgctatcagtctggcgaatcaaacaattgcatcccaggctgaaaccgcacacgtcgcggtcattagcatggacagcgatccggcgaaaatctttcaattagatgattctcaagggccggaaaaaataaaattattttcaatgctaaatcatgaaaaaggtctatactatttgacccgtgatttgcagtgttctattgatccccataattacctttttattcttgtttgcgcaaataacgcatggcaaaacattcctgccgagcggcttcgctcatggttggataaaatgaataaatggagcaggttaaaccattgttcgcttttggtaattaatcccggaaataataacgataaacaattttcattgttgcttgaggaataccgttcactttttggtcttgccagtttgcgttttcagggtgaccaacatttgctggatattgccttctggtgcaacgaaaaaggggtcagcgcccgtcagcagcttagcgttcagcaacaaaatggtatctggacattagttcaaagcgaagaggcggagatccaaccacgcagcgacgaaaaacgcattctgagtaatgttgctgtactggaaggtgcgccgccgctatcggaacactggcaactgttcaacaataacgaagtcctgttcaatgaagcccgtaccgctcaggcggcgacggtggtcttttctttacagcaaaatgcgcaaatcgagccactggcccgcagcattcataccctgcgtcgccagcgcggtagtgcgatgaaaatcctcgtgcgggaaaataccgctagcctgcgcgccaccgatgaacgtttgttattggcctgcggtgcaaatatggttattccgtggaatgcgccactctcccgttgtctgacgatgatcgaaagcgtgcaagggcagaagtttagtcgctatgtgccggaagatatcactaccttgctgtcaatgacccagccgctcaaactgcgtggtttccagaagtgggatgtgttctgtaatgccgtcaacaacatgatgaataaccctctattacctgcccacggtaaaggcgttctggttgccctacgtccggtaccgggtatccgcgttgaacaagccctgacgctgtgtcgccctaaccgtaccggcgatatcatgaccattggcggtaatcggctggtgctgtttctctcattctgtcggattaacgatctggataccgcgttgaatcatattttcccattgcctactggcgacattttctcaaaccgtatggtctggtttgaagatgatcaaatcagtgccgagctggtgcagatgcgcttgcttgccccagaacaatggggcatgccgctgcctttaacgcaaagttctaaaccggtcatcaatgccgagcacgatggtcgccactggcgacgaataccagaacccatgcgactgttagatgatgctgtggagcgctcatcatgatgaccatcagcgatatcattgaaattattgtcgtttgcgcactgatatttttcccgctgggctatctggcgcggcactctttgcgacgcattcgcgacaccttacgtttgttctttgctaaacctcgttatgttaaaccggccgggacgttacgccgcacggaaaaagccagggcaaccaaaaaatgactcaatttacgcaaaataccgccatgccttcttccctctggcaatactggcgcggcctttccggctggaacttctattttctggttaagttcggcctgttgtgggcgggatatcttaacttccatccgctcctcaatttggtgtttgccgcgtttctgctgatgccccttccgcgctacagcctgcatcgcttgcgccactggattgccctgccgatcggctttgctttgttctggcatgacacctggttgcctggcccggaaagcataatgagccagggttcgcaggtggcggggttcagtaccgattatttaatcgaccttgtcacacgctttattaactggcagatgattggggccatttttgttttattagtggcctggttattcctgtcacaatggattcgcattaccgtttttgtggttgccatactgctatggctgaacgtacttaccctggcgggaccaagtttctccttgtggccagccggacaaccgacgaccactgtaacaacgacgggtggtaacgcagcggcaaccgttgcggcgacgggtggcgcaccggtagtgggtgatatgcccgcacaaactgcaccgccaacaacggcgaaccttaacgcctggctgaataatttctataacgcggaggcgaaacgtaaatcgaccttcccgtcttcgctgcccgctgatgctcagccatttgaactactggtgattaacatctgttcgctttcctggtcggatatagaagccgccgggttgatgtcgcatccactgtggtcgcatttcgatattgagttcaagaactttaactccgccacctcctacagtggcccggcggcgatccgtttactgcgcgccagctgcgggcagacttcgcacactaatctgtatcaaccggcaaataacgactgctatctgtttgataacctttcgaaactgggctttacccagcacctgatgatgggacataacggccagttcggcggttttttgaaagaagttcgcgaaaatggcggcatgcagagcgaattgatggatcaaacaaatctgccggttattttgctgggctttgatggttcgccggtttatgacgataccgctgtgcttaaccgctggctggacgttaccgaaaaagataaaaacagccgtagtgccacgttctacaacacgcttccactgcatgacggcaaccattatccgggggtcagcaaaacagcggattacaaagcgcgggcgcagaaattctttgatgaactggacgccttctttactgaacttgagaaatcgggtcgtaaagtgatggtggtcgtggtgccggaacacggcggcgcgctgaagggcgacagaatgcaggtatctggcctacgtgatatccctagcccgtctatcaccgacgtccccgttggggtgaaattcttcggcatgaaggcaccgcatcagggggcaccgattgtcatcgaacaaccgagcagcttcctggctatctccgatctggtggttcgcgttctcgatggcaagattttcaccgaagacaatgttgactggaaaaaactcaccagtgggttgccacaaacagcaccggtctccgagaactcaaatgcagtagttattcaataccaggataaaccgtacgttcgcctgaacggcggcgactgggtgccttacccgcagtaagaacgaaaaaggccgcagagtttcccccctgcggcctggtccgggcgcaaattgccattacggcagcctgacgcccgcatgacacgttacttccgcttgttcagccagttcacgatcatactggcaagaatgccagcaatgaccggagccgctaaatcatgccagaaggccatgcccagctctgcgaacgtcatatagccgcctgtgttgtaatgacaacgtttcgcggctattcttgagtggtctagagtcaagattagcccccgtggtgttgtcaggtgcatacctgcaacgtgcgggggttttctctctccagcaaccaatgccaccagggataaagcccccgcaacattgcgcctcaccggaacctttccggcttgccgctgattctacgattgctttttactgtcagcacccggcaatcttcctcattgcgcgatgccttccagcttaatttctttatttgcaatagttgcagttcatatccgggctgactccagactggtagtgaaatgcgcaattttgtagaattgcgcctcctcgcgacctccccagtgaatctgttgcctcattttttacatactgcgtattcgacttctccacctgttgcgcaagagaaactgggtttattcatttttgcgaggccgacttctttctggacaggactttatgcagcacaacacactatcgaaacacaatcagaaattgccgtttacacgctacgacttcggctgggttttattatgcataggcatggcgattggtgccggaaccgtgctgatgccagtacaaattggcttgaagggaatttgggtatttattaccgcagcgatcattgcttatcctgccacctgggtagtgcaggacatttatttaaaaaccctttctgaaagcgattcctgtaatgactacaccgatattatcagtcattacctggggaagaactggggaattttcctcggggttatctactttttgatgattatccacgggatttttatctactctctctccgtggttttcgacagcgcctcgtacctgaaaaccttcggtttaaccgatgccgatctttcacaatctctactttataaagtcgctattttcgccgtactggtggcgattgcgtctggtggtgaacgattactgtttaagatttccgggccaatggtggtggtcaaagtagggattattgtcgtgttcggttttgcgatgatcccgcactggaatttcgccaatataaccgccttcccgcaagcctccgtctttttccgcgatgtcttgcttaccattccattttgcttcttttctgcagtatttattcaggtacttaacccaatgaatattgcctatcgtaaacgggaagcggataaagtactggcaacccggctcgcgctgcgtacccaccgaattagttatatcacgctcatcgcggtgatcctgttttttgccttttcgtttaccttctcaattagccacgaagaagccgtttctgcctttgaacaaaatatctcagcactggcgctggccgcgcaggtgatccctgggcatatcattcatatcacctctacggtgcttaatatctttgccgtactgaccgcattctttggcatttatctcggtttccacgaggccattaaaggcattattctcaatctgttaagccgaattattgataccaagaaaattaactcacgcgtgctgactctggcgatctgcgcttttatcgtcattacgttgacgatttgggtttcgtttcgtgtatcggtgctggtgttctttcagttgggaagcccgttatatggtattgtgtcgtgcctcattccgtttttcctgatctataaagtcgcacaactggaaaaacttcgcggatttaaagcctggctgattctgctgtacggcattttgctatgcttgtcgccactgttgaagctgattgagtaaaccggagcgcatggccccggttttgtgagttaacgctgcggattttcatcctgatcaacagcaaaacaagctaccagttgaccgccgtagtcttttagctgcggctgcaactgggtgcaggggccgaagcgccgacgacagcgggcgttgaaggcgcaacccggcggtggattcagtgggcttggtagttcaccgctgagcttgatgcgctcgcggcgatcgtccgggttcaggcgcggcgtcgcggaaagtagcgcctgagtgtacggatggcgcgggttattgaagatttggtctttcgttcccttctccacgcagcggcccaggtacatcaccatcacttcatcagcaatgtgctccaccaccgacaggtcgtgggagataaagacataagacagccccaactcctgctgcaaatccatcatcagattcagcacctgcgcgcgcactgaaacatccagcgcggaaaccggttcatcggcaatcaccacatccgggtcgagcatcagaccacgggcgatggcgatacgctgacgctgaccgccggagaacatatgcggatagcggtcatagtgctcggttttcaggccgactttcgccatcatcgacagggctttttcccgacgctgttctttgcttaagctggtgttgatcagcagcggctcttcaagaatttgcccgacttttttacgcggattcagcgaaccgtaagggttctggaagacgatctggattttctgccgacgcagcttctgcgcctgcggatcgtgcttaagcagatcctgcccctggtaatacagctcgccaccggtgggcatttcaatcatcgtcagcaaccgaccgagggtcgatttaccgcagccagattcgcccactactgccagcgttttgccacgttcaaggttaaacgaaacgccatccagcgctttaaccagacgttccggcgcgaacatgcctttcttcaccggataatgttttttcaggtcgatagcctgcaacagcggttgttgcagggtggcctcttgcgtactcatagtgtcggcctcccggcatcatcaagtgggtaatggcatttggactgacgcccgtcagcgagcatattcagcgccggttcttcagcgcgacatctgtcagtggcataggggcagcgcgggttaagcaggcagccgttcgggcggtcgtacttgccgggaacgacacctggcaacgacgccagacgttctttgtcctgagcaaattctggcagcgcacgcagcaatgcctgagtatacgggtgacgcggcgcatggaagatggcgtgcgcatcaccggtttccaccacctggcctgcatacatcacgatgattttatgtgccgcttccgccaccagcgccaggtcatgggtaattaacaccagcgccatgttctctttctgctgtagctccagcagtagttcgatgatttgcgcctgaatggtcacgtccagcgcggtggtcggttcatcggcaatcagcagttttggccgacaggcaatcgccatggcgatcatcacgcgctggctcatgccgccggaaagctgatgcgggtaaacatccagacgcgatgccggatcgggaataccgacctgattcagcaggtcaatcgctcgctgacggcgggtacttttgttgccgccctgatgcaccttaatcgcttccataatctggaaacccacggtgtagcacgggttaaggctggtcatcgggtcctggaagatcatcgccacttcggcacccaccaggttgcggcgctctttttctgagatacgctgcaaatcctggccgttaaactccagtttttctgccattacgcggcccggataatcaatcagccccataatcgccagtgaactgaccgacttaccggagccggactcacccacaatcccgaccacttcgccctgttttacgctgtagctgatgcggtctacggcgcggaacggcgcgctttcgtcgccgaaatgcaccgataatttatctacatttaataacgccatctcgaacctcttactgcttcagtttgggatcgagcgcgtcacgcagaccgtcacccatcaggttaaatgccagcaccgtcagcaggatcgccagacccgggaaggtcacgacccaccaggcgctttgcgcgaactgcaacacgtcggagagcatggtgccccactcaggcgttggcggctgtgcccccatgccgaggaaaccaagagcagccatatcgagaatggcgttagagaaaccgagcgacgcctgaacaatcagcggcgcaaggcagttcgggaagatgttaataaacatctgacgcatcgccccggcacccgccacgcgagacgcggtgacgtaatcgcggttaacttccaccagcacggcggcgcgggttaagcgcacatagtgcggcaaggcaacgaaggtcagtgccagcgcggcgttaccaatcgacgggccgaaaattgccaccagcaccagcgccagcagcagacttggcagcgccagcatgatatcgaccacgcgcataatgatgttatcgaccaggccgccaaagtaaccggcgatcaggccgagaataacgcccataatcagcgataacacaactaccagacagccaaccagcagcgacaggcgcgcaccgtacatcaggcgcgacagcacatcacggcctacgtcatcggtgcccagcaagtgcgccatgctgccgccttcctgccaggctggcggggcgagcagtgcatcgcggaactgttccgccgggttatagggtgcaatccagttggcaaagatcgcgatgaacagcacgatgacgacgtaaaccagcccgacgaccgcgcctttgttgcgtttaaaatagtgccagaactcctgtaacggggtcatcggcaccggtgcgctaatcactttattttcagtaacctgtgacatgatgtccccttacttcttatgacgaatacgcgggttcaccacgccgtacagcagatcgaccagcaagttgacgaggataatcatcgtcgccaccagcaatacgccgccctgcactaccggatagtcgcggcgttgcagtgcgtcaatcaaccagcgtcccagaccgggccacgagaagatggtttcggtcagaatcgcccccgccagcaatgttcccacctgcaggccgataacggtcaccaccggcagcatcgcgttacgcagcgcatggacgataatcacccgcatgcgggttagccctttggcgcgcgcggtgcggatgtaatcctcgcccagcacttccagcatcgaggagcgtgtcatacgcacaatgaccgccagcggaatagtacccagcacaatggcaggcaagatcatatgggcgacggcatcgataaagttgccgtcttcaccccagatggcggtgtcgattagcataaaaccggttaacggattggagtcatcgaggaacaccatatcgctcacgcgaccggagacgggcgtcaggttccagtgcaccgaaaccagcatgatcagcatcatgccccaccagaagataggcattgaataacctgtcagcgccaggccaaccgctgtgtgatcgaaaatggaaccgcgtttaaccgcagccagcacgccgaccggaataccgactgccgtagcaaaaatcatcgcgcagacgccaagttccagcgtggcctggaagcgcggcacgaactcttcccaaaccgggatgcggcttttcattgaaatgcctagatcgccatgcataacgccccaaatgtaatggagatactgctgccacatcggtttatctaagccgagttcagccagcagctgcgcgtgacgctctggggagatcccacgttcgcccgccatgatcatcaccggatcgcccgggatcatgtggacaaaggcaaatgtgagaagggtaataccgataaacgtggggatgacgagtcccaaacgtcggagaataaactgcaacataacccggattctctatagtgacccgcagcctggaactgcgtgtctgtattgctcacaaatcaattcccgcccttatcggacagggaatgaagtattgctgccggatggcgctgcacgcagaggcacagcgccaccgggtatacagattgttgacaaagtgcgctttgtttatgccggatgcggcgttaacgccttatccggcctacaaaatcgtgcaaattcaatacattgcagaattttcgtaggcctgataagcggagcgcatcaggcatttttgcctttgccatcagtcttgtatggcttttaattattcgatagagacgttttcgaagtgatgtttgcctaatggatcaaccacatagcctttaacttctttacgtaccggttcaaacacggtggagtgagcgatgatcagtgccggagcctgatcgtgcatcaccacctgcgcttgtttgtacagttcaacgcgtttattgtggtcgtcggtagcacgcgccggttgaatcagatcttcaaacggtttgtagcaccattttgagtagttggagccttgttcagaggcggcgcagctgaacagggtggcgaagaagttatccggatccccgttatcgccagtccagcccatcattaccgtctggtgctcgccatctttcgcacgcttgaggtactcaccccattcgtaggtgacaattttggcctgcacgccgactttcgcccagtctgcctgaatcatctccgccatgcggcgagcgttcgggttatacggacgttgtaccggcatcgcccacaggtcgatggagaaacctttttccagacccgcttctttcagcaaggctttcgctttttcaggatcgtaggtgtagtcctgaacgtcgtcgttatagccccacatggttggcgggatcaggtttttcgctgatacgcccgcgccctgataaaccgctttgatgatcgcgtctttgttcaccgcgtaggtcagagcctggcgaactttcacgtcatcgagtggttttttctgcacgttatacgagagataaccgacgttcagccccggcatttccatcagattgatggatttatcctgcttcatgcgagcgatatctgccgggttcgggtacggcatcacctggcattcattcttctgcaatttcgcgtaacgcacggaagcgtcaggggtaatagagaaaaccagcgtatcgatctgcggtttggtgccccagtagccatcaaacgctttgtagcggatacgggaatctttttgatactgctgtaactggaacggaccggttccgattgggttgaggtccagtttttccggtgtaccggctttcatcatcgcatcagcatattcttttgacagaatagaggcgaagtccattgccaggtcagcgaggaacggcgcttccgggcgagtcagcacaaactgaacggtgttgtcgtccacctttttcacttcactgatcagctctggcaagcccatgccttcgaagtattcgtagctgccgccagaaactttatggtacgggttttgcgcgtttttctgacgatcgaacgagaacaccacatcatcggcgttcagttcacgcgtcggtttgaattctttattgtcgtgccacttcacacctttacgcagatggaaggtataggttttaccgtcttcgctgacttcccacttttcagcgaggcccgggatcacttcggtggtgccgattttaaattcaaccagacggttataaagcgggacggaagaggcgtcataggtggtgccggaggtaaacagctgcgggttaaacccttccggagatccttctgagcaataaaccagagttttagcctgaacacttgctgcgacggtcatagccaccaggctgagaccaagcttcagcatccctgactttttcaaggaaatacgcattattctgctccaattgtgatgtttgttgttttaaccctttgcagtgggttgtcgctgcctgaccttttttgttttttgcccggtcgggtcaacgttatgaggtggggatgccgtactaattaacatcagtgtaacagtgcggatcctccataaaatgcccctcgtgacctacaatctgtcaacagaatgtgaaaacgtcaatacagccaaccgggatttacaccaacggtgagaatccacacacaaagattaaaaaaacttcaaacagctatttgcagcagagaaatttgtgctactccaacatgaccagaacaatcagcttaatatttagcaacatttggtgattaagttttatgcatttaatgaaaaaaatctgaggaaaaggtggatatctgagcgattaataccatgaacgctaaaacgcacagcggaaaatgccagggccagccataagtaacgcaaaaaaagatttaagcaaatataaaaaaagacaatggtttctgtcacaaatccgttaatggatagtgagatatggggcgcaaatttggcagggaaatgtgtgtcgtgtaggtcgaataaggcggtcgcgccgcatccgacaatggccggcacatttgcctgatgcgacgctgacgcgtcttatcaggcctacgtcgagtcgaacctccctgcccccggaggttctcatcctcatgagctgcagatgcaaaaaagcctgctcgttgagcaggcttttcgaatttggtcggtgatagaggattactcgccacttcgtggctcgccctgcgggccgttgctggcgcaacgttctctcgcttcgctcgagtcgaacctccctgcccccggaggttctcatcctcatgagctgcagatgcaaaaaagcctgctcgttgagcaggcttttcgaatttggtcggtgatagaggattcgaacctccgaccccttcgtcccgaacgaagtgcgctaccaggctgcgccaatcaccgaatgcggggcgcatcttactgcgcagatacgccctcgtcaatcccttaatagcaaaatgccttttgatcggcgagaaagtcagcaggccgcttagttagccgctgcctcttttgcctgcgggatgtgacaccagttgttgttttcgttaattccaccatccggtgaagtatagccaagacaacccatgatggtatcgtacagctctacgtgacggcgtggcactttcatgtcggcttcttttttcagctgcgcaaacgcctgcgcattggccggattttccagatatttatctgacatccagaccatcatcggtacgcggaactgctccggcggtgccagttcacgcggcgtgccgtgcaggtgctcgcgttcattaattgactcaccgtggtcagctgcgtagaacacaatcgctttcttatcgcgaacctgatcaatcacgctggagataaagtgatccacataggtcaccgagttgtcataggagttgatcatctgcgctttggtacagccgctatcaacaccaatacattccggcttccactgcgcgaagctacgcggataacgctgggtgtagttaaaatgcgaacctttggtatgcagaatgatcagatgcttaccatccgggttgcgccctagcgattgctgcatttcgtctaccagcaacatatcatctaccggcttgccacgattacgtggctccgcaccaatctgctcacgataagcaatgttgtccgccatcgtgttgctgtagaaccacatttcgctctgcatagcgtagaggtcagaactgaatcctaactgcttcagaaccgcgaaaatgttctgttcttttaatgtgcgctgcggattatcttccgcgcccccctgacgtacaaacatgcaacgcagtgagagtttggttgcggtatcacaggagtaaccacggaacgccgccagatttttctcctgggccagtttcggcgtggtattacgctcatagccgaaaatacccatatggtcccaacgcgtggtttcaccgatgataaacacgacataagtgtcatcaacgttttgcggtgcctgataagtgaatttcttcgccggattaagcaatgaattattatcggaagattcatcgacccgcgcccaggcatacagccccaacgcagaaagccagtttgatggcagataagagttcgctacgacaccgccataactcggcaaatcaacgccggtcgccctctccactttcttctgctggatatccagcaaacgaatcggtgcccaaaccataatacccgccagtacgacgaccgccaggctgcgaatacgctgccctggggttcgcagttgtcggagcaaggtgtagcgacagcggttattccagataaggataagaggcaatgcactaacggcgattaaccagagaataaagttcagaccaacaacttcttttgacaggtcgatatcggtggtcatgacggaagcgatgatgccataaccaatgaccacattaaggaaggtcatgtaatagctggcacctgcggaaaagagcaccaccagcgatgccagaatacgccagctgcggcggccaaacagcgaaagaagacgtagtaaaaagaaggtcaccagtacggtggcggccagttcaacaacagcagaaatgcctttccagacggtaaaatcgtgcgcatagctgccgaagcggcggtaaaaaaccgcgccattcataaaaaggccaatatagattgcaagcaaaaagctcagcttctgctgtgtaatcgatttgatgtatctcatgcaaacaaaccctggacaaacaggtgataacaccctgcttagtggcttttcaggcccggcagggaaaaagtgcggaggtagtcagataagtaaaatctacacgcgcgaataagtagaccacagcaaagggaaaaagtgtggggaaagagtgtgcatgaagcacaaatttacaaaaatgcaagtttgaaaagagactttagcgttacaaaaagcagtaaaaagggccagttaattggcccaaattttacgagtcattgtttatacatttcgttgatgcgtttgatgcacacggaagctgaagcccagtagctcgcggctgagcattaaagggagccatgcgcctcacgcaacattttctgctctggctgacgaatcgtcgtagaaagcgccaatgacagaatcagcagggcgaaaatcacgtagaaggtcacatagaagccgccaaacagtgaggcgataatcgaaccacaaatgctaccgataccgaaaccgagataaatcacaccgtagtttttcgccaggttattgaggccaaagaactcactgaccagtgacggaaagacggtaatagtgccgccaaagttaaatgccacgcaggcaatcgctgcaaagaacgtcactgcattcaatggtgcaaacagcagggccgccatacccaccagcgatatcacctgaccaatggtaataacacggatacgggcgattttgtcagacagaatacccagcaccagacgacctgaaaggttggcgatggaaataacagtgactgcattggctgcggaaaccacatcaaggtgtgccagactttgggcgatatctttcgctaccccaatcacgtacaggccgctcatgcaggcggtcaggaacattaccgctaacatccagtactgcggtttacgcatcgactctgccagcgtgtaatctttctccaccacaccattgctggttttcacttcctgttttggtgcgtctttcattaacgttgcgccgaaaacaatcatcaacagcgcaatcgctccccaaatcacaaaggttttttccagaccgaccgtttccagcagctgcgtgtcgataaatttgaaacccaggctacccagaccataagaaccgatagcgaacgcggagatcagacctttacgctccgggaaccacttcacacagttagagagcgtcagcagataacccgcgccatctgccagtcccaccagcacaccggcgcttaaccacagcatcatcaggttgtcagaatgcgctgtcaggaagaagcctaatcccagcaaaatgccggaagccatggtgacgcgtttaacgccaaaacgttcctgtaatttgcccgcaacagaagacgaaattgccagccccagacttaacaagccgaaagagaaagcgacctggcttaccggcgcatccagcttggcggaaagcgcgccattaaacaggctccaggtataaaccgaccccagcgcaaactgggtaatgatagtaccgatgagtgtcagccagcgggtacgctgataatttgaaggtgtcatggcagtattcctgcagtaataaaaaggaaaaatctctgccgacaaccataacgaagtgcactttatgcctggggaaaaacggcatgaaatgccatcagaacggaatgaaatgccttagttcaggaatgaatgacgcgacaattattcaccaaatttattatttggtaagttagcacccactatcgccacaactattgttatttaatggtttcaattgtgactgttacgttaaaatctggcgctaacccccatcgtatacagatagtcgctattattagtggtattttctgcctgagttagcgcggcataggcggcaatattttgattgagcaacatatcagcgcctacggtgacatccagccagttgccgttctggtttgtcgccgtcatccggctcaggcctgattgcgccttccagatattctcgccaaattgctggttatagctgatttgcgcccagggtcggagatcgccaagccgggagtcaacacgccagcctaaggtactcacgctggcatgccataacggatcggtcagcgtggtagtactgtcgccaaactcgttatacatcgaggtggttgtgccatcgtaatgtaatgccgcgaccgggccggttgtaacctgttcatataaaggaaaattccagcccatactcatactgctggtcacatccacaggggtttcttccgccagattgacttccagtcccagcgccctttggctactttgaatacgttgcgacaaaatatcgttgtaatcaggttgatgatcactatcccaggtgtaacgctctgtggaaagtccgggttgcgtatcaacgatatattcttgttgccaggcgtaagctgtgttgagaaaaaaggcactgattaccacgctcgccagcaggcttagctgccagcgaccaccgcttttttttatgatcattaacacgactccagggaagagccgaattcggcaatattattgtcattgtatgaaggatatcgggcatagtagccctgtattaaatattgactttttcaccgatgcgtcaagaaaagcggctgaaatttttacgatcgggtacatagcgagggaaagtatggaacgttgcggctgggtgagtcaggacccgctttatattgcctaccatgataatgagtggggcgtgcctgaaactgacagtaaaaaactgttcgaaatgatctgccttgaagggcagcaggctggattatcgtggatcaccgtcctcaaaaaacgcgaaaactatcgcgcctgctttcatcagttcgatccggtgaaggtcgcagcaatgcaggaagaggatgtcgaaagactggtacaggacgccgggattatccgccatcgagggaaaattcaggcaattattggtaatgcgcgggcgtacctgcaaatggaacagaacggcgaaccgtttgtcgactttgtctggtcgtttgtaaatcatcagccacaggtgacacaagccacaacgttgagcgaaattcccacatctacgtccgcctccgacgccctatctaaggcactgaaaaaacgtggttttaagtttgtcggcaccacaatctgttactcctttatgcaggcatgtgggctggtgaatgatcatgtggttggctgctgttgctatccgggaaataaaccatgattcgggaagcgcaacgttcagaactccccgcgatcctcgaactgtggctggaaagtacaacctgggggcatccctttataaaagcgaattactggcgtgactgcattccgctggtgcgggatgcctatcttgccaacgcgcaaaactgggtctgggaagaagacggtaagcttctcggttttgtcagcattatggaaggccgatttctggcagcgatgtttgtcgcaccgaaggccgtcaggcgcggtattggtaaggcgctgatgcagtatgtgcagcagcgccatccccacctgatgctggaggtttatcaaaaaaatcaaccggcgataaatttttaccaggcacagggttttcacattgtcgattgcgcatggcaggatgaaacccaactacccacatggattatgagctggccggtggttcaaacgctgtaagtgtcagttccggaccgttgtatttttccagccatgccagcgccgtattacccgcacagccattccccagccgcgagctggggagatctttggtcagcacgttcactgcgccgtttttacaaataccgtcagcggttaaatccagatccggccatgccccttcgtgaatgcaaatcacgccaggtttaattccctcgctaatgaccgctccggcaagaatttgcccgcgtgcgttccacaaccgaacagtatcgccatcttgtatgccgcgctcctgggcatcgtcaggatgaatggtgacaggctcacgatttgccaccgcgtacaattcgcgcagagaactgtaattcagctggctgtgcaggcggtgcgccggatgggcagaaagtacctgcaactgttctggttcggcattgccctgccattcgtccggctccagccacattggatgcccagggcaatccgggtaaccgtaatcggcaatacgctgtgagaagatttcaatcttgccgctggcggtttttaacggatgcgccagcggatcgcggcaaaaatcagcgaagcgaataaaccgctcgctgtccgggttttccggcatctcaattaactggttggcttgccagaactcagcaaatggcggcaattcaacctgctggcttgccccgcgctgtcgggcaacgttataaaacgtttccagccattgcagctcactttttccttccgtaaaacgtgcataaccgcccttctcccagcgttcacttaactcggcaaaaacatcaaaatcattacgcgcttcatagcgtggcggcaccacttgcttcatcggcaccagatgctgattactgtaatcaccggtcatggtgagatcattacgctcaaaagaggtagtcgcaggcagaacgatatccgcgtgttttgccgccgccgtccagaagcattcagagatcaccaccagctccggtttttgccaggcacggatcaggcgattggtatcctgatgatgagtaaagttggcaccgcccgcccaccagataaaacgaatatccgggaaatgtcggttcataccgttgtgttgatatgcgccaccagggttttccagtgcttcaacaatgcgggcaacagggattttatccaccgcatcgcagccacccggcaagctgccctgcatggaagagagcaccgcagaacgccgcgtggggttaccaccattggcaaaatggtaagaaagaccaaaaccgccgccgggtgtgccgatttgccccaacattgctgccagcgtgacgatcatccagtgtttttgctcaccaaactgttggcgctgcattccccagcctgccatcagcatggtggtattttggtggaaaatagccgccagctcgcggattttcgctgcgccaacaccacaaatctctgctgcccattcggcggttttcgctattccgtcactctcgcccagcaaataagaggcgaagacggcataacctgtggtgcaacgcgccagaaacgcttcgtcgtgccaaccattttccaccagcgtatgggcgatccccagcatcagcgcaacatcggtgcccatgtgcggtgccacccactccattttatcgccaaagaaatcgacggtttccgatcgcattggatcaatgcagatcagctttttcccgctgtcacgcagtgcagaaaagtaagaaagcccctgctcatcggatgcattccacgcaattttcagcgtattgagtgggttagcactccacagcaccacgacatcgctatgttccagcaccagcggccaactggtctgctgttgataaacttcactaccacccacgacatacggcatgatcgcctgtgccgcgccggtcgaataatcccccagatgcccggtataaccgcctgccagcgccatatagcgttgtaataatgtcgaggccttatgcagcacgccgtttgaacgccagccgtaggaaccagcaaaaatcgatgccggaccataagcctcacgaatgcgtttatgttgttggtgaataagatccagcgcctcatcccaactcacgcgaacaaattcatcctgcccacgaatgccttgcgggttttccggtgacgcaagaaagccttttcgcaccattggaaatcgtacccgcgtattgctgtgaacctggtcgcgaaccgcgctctgcaaggagttttccattcctgtggctaacgcgccacgcgagctaaacacggtttcgccgtcggtttcaaccagcatgggcccccaatgggcggcagtcagaacggaatatcgtgaggatgagttggccaaaccgaagactcctgaaaggttagatgtattgagcagttaaatattacttacaaatttccgagtattcccaggaataatcttcatgttcacgcggcataatctcccgccacggaacccgtggcaaagaataaaaaggttattaaggattaacaatgaagaaacgtgtttatcttattgccgccgtagtgagtggcgctctggcggtatctggctgcacaactaacccttacaccggcgaacgcgaagcaggtaaatctgctatcggcgcaggtctgggctctctcgtgggcgcgggtattggtgcgctctcttcttcgaagaaagatcgcggtaaaggcgcgctgattggcgcagcagcaggcgcagctctgggcggcggcgttggttattacatggatgtgcaggaagcgaagctgcgcgacaaaatgcgcggcactggtgttagcgtaacccgcagcggggataacattatcctcaatatgccgaacaatgtgaccttcgacagcagcagcgcgaccctgaaaccggcgggcgctaacaccctgaccggcgtggcaatggtactgaaagagtatccgaaaacggcggttaacgtgattggttataccgacagcacgggtggtcacgacctgaacatgcgtctctcccagcaacgtgcggattccgttgccagcgcgttgatcacccagggcgtggacgccagccgcatccgtactcagggccttggcccggctaacccaatcgccagcaacagcaccgcagaaggtaaggcgcaaaaccgccgtgtagaaattaccttaagcccgctgtaatccctttcatgccaggtgatgcagaaatcacctggcattcttcagttttccttcatcatatttcaggctaaggtgatcgccttatcagtgaatggagagaagcatgaagccgtccgttatcctctacaaagccttacctgatgatttactgcaacgcctgcaagagcatttcaccgttcaccaggtggcaaacctcagcccacaaaccgtcgaacaaaatgcagcaatttttgccgaagctgaaggtttactgggttcaaacgagaatgtaaatgccgcattgctggaaaaaatgccgaaactgcgtgccacatcaacgatctccgtcggctatgacaattttgatgtcgatgcgcttaccgcccgaaaaattctgctgatgcacacgccaaccgtattaacagaaaccgtcgccgatacgctgatggcgctggtgttgtctaccgctcgtcgggttgtggaggtagcagaacgggtaaaagcaggcgaatggaccgcgagcataggcccggactggtacggcactgacgttcaccataaaacactgggcattgtcgggatgggacggatcggcatggcgctggcacaacgtgcgcactttggcttcaacatgcccatcctctataacgcgcgccgccaccataaagaagcagaagaacgcttcaacgcccgctactgcgatttggatactctgttacaagagtcagatttcgtttgcctgatcctgccgttaactgatgagacgcatcatctgtttggcgcagaacaattcgccaaaatgaaatcctccgccattttcattaatgccggacgtggcccggtggttgacgaaaatgcactgatcgcagcattgcagaaaggcgaaattcacgctgccgggctggatgtcttcgaacaagagccactgtccgtagattcgccgttgctctcaatggccaacgtcgtcgcagtaccgcatattggatctgccacccatgagacgcgttatggcatggccgcctgtgccgtggataatttgattgatgcgttacaaggaaaggttgagaagaactgtgtgaatccgcacgtcgcggactaagccgcgactgcgtagagtaaagcccgataatcgctcgggcttttactctttattgggttgcagtaactgctgtagtccaggcctgattaaacgcctgatgctgtgccggtaatggcgcaatcagtttgttatattcacttgcctgctgtgaagtcgggaactggatgccatttgcgacaaagctcacctgagtaccttgctgagcaatgtagtctccaaccatcaccagttgttgcgtgaaagtttgtgccgccggaatcaacggttgcaatgcatcagctggcgtcgttaccactttggtgaatgcctgatcaaagaccggtttcaaatcatcgctctgttttagcgcagagtgcgcagcatcggcctgcaacttcgcattttgcagttgttgcgccagcacacccagcgaaccgttcatttcacgcagcggaccgctttgcgtaacgtaatcctgcggtacgcgaattgcgttaacgctgtctacaaccgggcgcagaccggaatccatcgcctgattcacctgctgagaataaccatacagaatcgcgtaatcagagacaaaaggaccaaactgttttttctgatcggcagtcagggttggtagacgttcaccgctacgcatcactgtattctgcaggaagtcgataaacgctttacgctgatcgccttctttatcaaaacacccactcaggctaactaccattaataacgccgcaagaggcgcaaaccagcgagagcaggactttcctgtcgccattttcttactcctttcacccaaaaaaagcgcacaacgacacacgcgtgtctgacgtgacaaggatagtccaggacaggcttgcaggataccctttctacgtaatcttcctggtaaaatcatggagaaaatgaaacaaggttaatttgttgtttcattgttaaaaaatgatagtgccgttgccttttttgtagccagagatttacgccttcgcagaaggttagattttcgaaatctttacaaaacaggagtggtaagagatatatcggcatttatcagatcgttaggtggctataagtcacgctaaatgacaggctgaatcgaatcatagccagagcatgccctgacttcaccccgctgtgtctgcttttcccgactattcttaatgagcttcgatgcaattcacgatcccgcagtgtgatttgaggagttttcaatggaatataaagatccaatgcatgagctgttgagcagcctggaacagattgtttttaaagatgaaacgcagaaaattaccctgacgcacagaacaacgtcctgtaccgaaattgagcagttacgaaaagggacaggattaaaaatcgatgatttcgcccgggttttgggcgtatcagtcgccatggtaaaggaatgggaatccagacgcgtgaagccttcaagtgccgaactaaaattgatgcgtttgattcaagccaacccggcattaagtaagcagttgatggaatagacttttatccactttattgctgtttacggtcctgatgacaggaccgttttccaaccgattaatcataaatatgaaaaataattgttgcatcacccgccaatgcgtggcttaatgcacatcaacggtttgacgtacagaccattaaagcagtgtagtaaggcaagtcccttcaagagttatcgttgatacccctcgtagtgcacattcctttaacgcttcaaaatctgtaaagcacgccatatcgccgaaaggcacacttaattattaaaggtaatacactatgtccggtaaaatgactggtatcgtaaaatggttcaacgctgacaaaggcttcggcttcatcactcctgacgatggctctaaagatgtgttcgtacacttctctgctatccagaacgatggttacaaatctctggacgaaggtcagaaagtgtccttcaccatcgaaagcggcgctaaaggcccggcagctggtaacgtaaccagcctgtaatctctgcttaaaagcacagaatctaagatccctgccatttggcggggatttttttatttgttttcaggaaataaataatcgatcgcgtaataaaatctattattatttttgtgaagaataaatttgggtgcaatgagaatgcgcaacgccgtaagtaaggcgggaataatttcccgccgaagactcttactctttcaatttgcaggctaaaaacgccgccagctcataactctcctgtttaatatgcaattcacacagtgaatctcttatcatccaggtgaaaaataaaagcgtgaaacaaatcactattaaagaaagtaatctatatttctgcggcattcccagcctcctgtgttgatttccaacgagtatgtactgcacccattttgttggacgatgaaatggaatagcccctaatatgtcaaagccaaaatacccttttgaaaagcgccttgaagtcgtgaatcactacttcacaactgatgatggttacaggatcatctcggcacgttttggtgtcccccgaacccaggtcaggacatgggttgccctctatgaaaaacatggagaaaaaggtttaattcccaaacctaaaggcgttagtgctgatccagagttgcgtattaaggtcgtgaaagctgtgatcgagcagcacatgtcccttaatcaggctgctgctcactttatgcttgctggtagtggttctgtagccaggtggctgaaggtctatgaagagcgcggagaagctggtttacgcgcgctcaagattggcaccaaaagaaacattgcaatatcagttgatccagaaaaagcggcatcagcattggagctgtcaaaagaccgacgcattgaggatcttgaaaggcaagttcgatttcttgaaacgcggcttatgtatctaaaaaagctgaaagccttagctcatcccacgaaaaagtgaaagtactcaacgagctaaggcagttttatcctcttgatgagcttctcagggctgcggagataccgcgcagtacgttttattatcatctaaaggctctcagcaagcctgacaagtatgcggacgttaaaaagcgtattagtgagatttatcacgagaatagaggccgatacggataccgtagggtaacgctgtctcttcatcgagaagggaaacagattaaccataaagctgttcagcgcctgatgggaaccctctcacttaaagcagcgattaaggtcaagcgataccgctcttacagaggagaggtagggcaaaccgcccctaatgttctccaaagagatttcaaggctacgcggccaaacgagaagtgggttaccgatgttactgaatttgcagtcaatgggcgcaagctgtatttgtctccagtaatagatctcttcaacaacgaagttatttcttacagcctttcggaaagaccagtgatgaacatggttgagaatatgctcgatcaggcattcaaaaagcttaatcctcacgagcatcctgttctgcactctgaccagggatggcagtatcgtatgagaagatatcaaaatatccttaaagaacatggtattaaacaaagcatgtccagaaaaggcaattgtctggataatgctgtggtggagtgtttctttggaaccttaaagtcggagtgtttttatcttgatgagttcagtaatataagcgaactgaaggatgctgttacggaatatattgaatactacaacagcagaagaattagcctgaaattaaaaggtctgactccaattgaatatcggaatcagacctatatgcctcgtgtttaactgtccaactttttggggtcagtacaaactttgatttatagtcaggtggggcttttctctgtctgcctttcggtgaatacctgagacaaacagtctcaagcacccgtggctattctagcttaataagtttgtttcttctccttgatataatcctaaaaaaatctcataaaattaatatatgagataatctttattcagcagaagattattaaaggttgctgtattatttagcgataaaaaaagcctgccagatggcaggctatttaataacggcgttattattgcaacagcgaaatatccgcaacgcgcaggaacagttcgcgcagtttctccagcatggtcagacggttgatacgcaattctttgtcatcaaccatgaccatcactttatcgaagaaagcatcaaccggttcacgcagctcagccagttcgaccagcgcatcctggtaacgaccttccgtaaagtacggctccagcttgtcacgtagcaccacaacctgcatcgccagtttaatttcttccggctctttcagggtagaggcattcacgcggtcgctcagcacttcgtcagatttcgccagaatgttagatacacgtttgttcgccgccgccagtgcagcagctgcatccagggtacggaaatgcgataccgctttcatacgggcatcgaaatcagccggacgagtcggacgacgcgccagtaccgcctggatggtgtcaacggtataaccttcgtcctgataccaggcgcggaagcgaccgagcataaagtcgataacatcatcaactacgttggcattagtcagcttatcgccatacagacgcaccgcttcttcggtcagcgtttgcagatcaaggttgaggttcttctcaacgataattcgcagcacgccaagcgcggcacgacgcagcgcaaacgggtctttgtcgcctttcggatgctgaccgataccgaagatacccgccagggtatccatcttgtcagcaatcgccagcgcacaagctactgggttggacggcaggtcatcaccagcaaaacgcggctgatactgctcattcagcgccaccgcgacatcttccgcttcgccatcgtgacgcgcatagtgcatccccataacgccctgggtgtcggtgaactcgaagaccatgttggtcatcaggtcgcacttagacagcagacccgcacgggtagcgtggttaacgtcagcgccaatctgttcagcaatccagccagccagcgcctggatgcggtcagttttgtcgcgcagcgtccccaactgttgctggaacaacacggtttgcaggcgcggcaggttatcttcaagacgttttttacggtcggtgttgaagaagaactcggcatccgccagacgcggacgaacgactttctcgttaccggagataatctgctgcggatctttcgattcgatgttggcaacgaagataaagttcggcagcagtttgccgtcgttcgcatacaccgggaagtatttctggtcacctttcatggtgtaaaccagcgcttcagccggcaccgcgaggaatttctcttcgaattttgcggtcagaacgaccggccactccaccagcgaagccacttcttccagcaggctttcgcttaagtcagcgttaccgccaatcttacgcgctgcttcttcggcatcggctttaatcttcgccttacgttcttcgtaatcggcgatgactttcccacgctcacgcagaatttccggatactgatcggcgttatcgatggtgaattccggctcgcccataaagcggtggccgcgaatcacgcgatcggactgaatgcccagaatggttgccggaatgactttgtcgcccagcagcagggtcacggtgtgcaccggacgcacgaagtgcacgtcgcttgcgccccaacgcatcagtttcgggatcggcagtttcgccagagaagtcgcaaccatattcggcagcagtgcttcggtgctttcgcccttcacatgggcgcgatacagcagccattcgcctttatcggtagtcagacgctcagcctggtcaacggtaataccgcaaccacgcgcccaaccttctgccgctttgctcggtttgccttcagcgtcgaacgcctgggcaatcgccgggccgcgtttttcgatttcacgatccggttgcgcttccgccaggttagctactttcagcgccagacgacgcggagcagcaaaccattgaacggtgccgtgtgcgaggccagcgttatccagctccgcagtaaagttcgcagcaaaggactcagccaggctgcgcagtgcttttggtggcagctcttcagtgccgatttccaccagaaaagttttctcagacatagccgcctcttacttatctttgttgcacatcgggaagccgagggcttcacgggaagcgtagtatgcttctgccactgctttggtcagggtgcgaatgcgcagaatgtagcgctgacgctcggtgacggagatggctttacgcgcatccagcaggttgaagctgtgggcggctttcagaatacgctcgtaggctggcagcggcagcggattttccagcgccagcagctgctgcgcttctttctcgtactgctcgaagcaggtgaacaggaagtccacatccgcgtattcgaagttgtaagtggactgctccacttcgttctgatggaacacgtcgccgtaggtggttttacccagcgggccgtcgctccagaccaggtcgtaaacgctgtctacgccctgaatgtacatggccagacgttccagaccgtaggtgatctcgccggtaaccggtttacactccagaccaccaacctgctggaagtaagtgaactgcgtcacttccatgccgttcagccacacttcccagcccagtccccaggcacccagcgtcgggttttcccagttatcttccacgaaacggatgtcgtgaatagtcgggtccatgcccagctctttcagagaaccgaggtacagctcctgaatattgtccggcgatggcttaatgaccacctggaactgatagtagtgctgtaaacggttggggttttcgccgtagcgaccatcggtcgggcgacgagaaggctgaacataagcagccgccatcggttctggccccagctcgcgcagacaggtcattgggtgagaggttcccgcgccgacttccatgtccaatggttgaacaatggtgcagccctggcgagcccagtaatcctgtaaggtcaggatcaagccctggaaggtcctggtatcaaacttttgcatattatttcgtgctggatacgtgtggatttaaaggaagggatcagtatacccgctggatggaagatatacagtacgaaacgggaaaaagcagggcttaacgcatggaaagatgcaaaaaatggccatccgcgtcaaaagaacagacaaactgctctttacggaaggtataaccgcgcatttcatagcttccctggaactgttcgaaggcggtgacgtcgattttttgctcgccggtgttataacgttttgccgcctgatccttgcataacgcttccatattcaacgaacgcagaggatcaacctttacccgttgtgctttctgcacgggtgacggtatagaacaacccactagcaccataagcgccattgccggaaagaaagcgttcatcatcattaaattaccgtctggtttgcaggtgagtcttattatttatatcggtatagtggctgatatcttacgaatttccttaagcctctataagctgtagtgataaaactcagattattccagtgcgccaaccaaatgatttatcggtcagactttttttaaccagatacagagacacagatgcagcccaaaatttactggattgataacctgcgagggatagcgtgtttaatggtggtgatgattcacaccactacctggtatgtgaccaatgctcatagtgttagccccgtcacatgggatatcgccaatgttctgaattctgcctctcgtgtcagcgtgccgctatttttcatgatttccggctatctcttttttggcgaacgcagcgcccagccgcgccatttcttgcgtatcggcttatgtctgattttttatagcgcaatcgcactgctctacattgcgctgtttacctccatcaatatggagttagcgctgaaaaacctgctgcaaaagccagtgttttaccacttgtggtttttcttcgcgattgcggtgatttatctggtttcaccgctgattcaggtgaagaacgtcggcggaaaaatgttgctggtgctaatggcggtgattggcattatcgctaacccaaacacagtgccgcagaaaattgacggttttgaatggctgccaattaacttatatatcaatggcgatactttttactacattctgtatggcatgttgggccgcgctatagggatgatggacacacagcataaagcactgtcgtgggtgagcgccgcgctgtttgcgacgggggtttttattatctctcgcgggacattatatgaattgcagtggcgcggaaattttgccgatacctggtatctttactgtgggccgatggtttttatctgcgcaatcgcgctattgactctggttaaaaacacgctggatacgcgtaccattcgcggacttggcttaatctcccgccattcattgggtatatacggattccacgccttgattatccatgcgctgcgcacccggggaattgagcttaaaaattggccaatactggatattatttggatcttttgcgcgacgttggcagcgagtttgttactttctatgctggtacaacgaatcgacagaaacagattagtgagttaagtaaaagcccggtcacattggactgaccgggcttacgtgagttattcgctgtattcttcctgggtaacctgtgtttcttttggtgggtttattccggcatcacgaatatttttctgcaccgctactgcaccaaacaagcttaagaagaaagccagtccataaaaacctttttcgctgagtaataatgtcgcattccacagacctaccatcagtaatgcaacagagataataaagacagtcaggcaggtcatataataaatggaagtggtcggtatgccttcatacttgtcccgaacggtcttttgataagacgccgcagaaaacagtcctaataccagtacggcaaaataatatcctttttcatttaactgcatctctgcattccatagccctaacagataggtaacgataccaccaacgagagctatccatgacacaatactaaaggccggtgaataggttgatattttgttgtccatcacagtattcctttcattcctgaatatgtaagagctttatgttgctcatgccgagcgaaacaaacgcatttgaccaaacaagcagacaaaaaaggcgatgggatagatcaccatttcataagtattgataggtgcgtttaaaacaccgataaacaagagaccgatagtgattaacgcaactaactggcagatatgggtaaaaaaatcatccagttgcccgagtttttctgcgcgaagatatgcatagttgccaaaagttgctgtcattaacacgccaagaaaatagccttttccacttaacaatgggcatgagatccatagcccaaccagataaaccagcgccccgacaacaaataatagttttgccacagtctttgaggttttcataacgatctccatatctaccagcgatacattacgagtaaccaacgaaagacaaaactgaaaaatgccattaacaaatgattttcagaataaattcatactaaatattaattaattactgagatatatagatgtgaattatcccccacccggtcaggcaggggataacgtttacgccattaatggcagaagttgctgatagaggcgacggaacgtttctcgtcgtggctgataagcggcataacgctgcgcatctggtagatgcgactgttctaacggtagttgcggcaacaattcaatgagcgatttctctggattcgccgcgatctgcgccagccttgctgcgcccagtgctggccccacatccccccccgtacggtaatcgagctgctgaccgctgatatccgccagcatctgacgccagtactcactacgcgccccgcccccaatcaacgtaacactttgcggtttaataccgcaggcatgcacgacatccatgccatctgccagcgcataacccacgccttccagcactgctcgcgccagttcattggggccatgttgatgagtcaaaccaaagaaaacccccttcgcctggggattattgtgtggcgtacgctcgccggaaagataaggcagaaaccaaactggctcggcactttcatcagcctgttgagctgcagcgattaaagctgggacattgctcaggccggttaatttcgcggcccaatccagacacgacgctgcactcagcatcacagacattaaatgccaacgttgcggtagcgcatggcaaaagctatgtacggcgctttctggcttgcttaagaacccttcgctgacagcaaaatagacccccgacgtccccagcgataacattgcctgattagcatcaaccattcccacaccaactgcaccagctgcattgtcgccaccgcctgcgacaactggcaccgtcgccataccccacgctttcgcaacttcaggtaacaaagcaccagtaatttcgctgccttcgtataatgcgggcatctggtcacgagataagtcgcaagcctgcagcatgacgtcactccagtcacgctttgcgacatccagccacatggtgccagctgcgtcagacatatcgctggcaaactcccccgtcatacgcagacgcaagtaatctttcggtaataatactttgtcgatttgacggaatatctccggctcatgccgctgaacccatagcaatttaggcgcagtaaatccgggcatcatcaggttgccggtaatcacccgcgattgcggaactcgcgcttccagcaaagtgcactcttgcgcacagcgcccgtcgttccacaaaatggcagggcgtaacacccgttgctgagcatccagcaaggttgctccgtgcatctggccggcaatacccaatgctttaacgtcctgcagagaatgctgatcgcccagagctttcattgcgcgatcagttgcctgccaccactgttccgggtcttgttccgaccagagtggatgcgggcgcgaaacggtcagcttttccgtttgcgcagcaaccacctcaccctgctcgttgagcaaaataacttttacgcccgaggtgccaagatctatcccgatatacatatcgatcgttccttaaaaaaatgcccggtatcgctaccgataaccgggccaacggactgcacagttagccgttatttgtcgaacagataatggtttaccagattttccagttgttcctggcgaccactctgatgcaccggagacaaatgatgttcctgagcatatttggctaaatctgccagtgacatttggcctttcaggatttgctggcccaattcgctattccagccggaataacgctgcgcgatgcgtttatccagctcgccatcttcaatcatgcgcgctgcaattttcagcgccagtgccatcgtatccatcgcgccgatatgaccgtaaaacagatcatatttatcagtactttgacgacgtactttggcatcgaagttcagaccaccggtggtgaaaccgcctgctttgagaatttcatacatcaccagcgcattctcttccacactgttcgggaactggtcggtgtcccagcccagttgcgcatcgccacggttggcgtcgacagaaccgaacaggccaagcgcaatggcggtggctatttcatgatggaaagagtgacctgccagcgtcgcgtggttagcttcaatgttcagtttaatctctttttccagaccaaactgtttcaggaagccatagaccgtcgcggcatcgtaatcatattgatgtttggtcggttcttgcggtttcggttcgataagcaacgtgccctggaaaccgattttatgtttatgctcaaccaccatctgcataaagcggcccagttgttcacgctcctgacgcaagtcggtatttaacagcgtttcgtaaccttcacgaccgccccacaggacatagttttcaccgcccaatttatgggttgcttccatcgctgtaacaacttgcgttgccgcccagctgaagacttcaggatctgggttcgtcgccgcacccgcgccgtagcgagggtttgtaaagcagttggccgttccccacagcagcttcacgccgctctcttcttgcttgcctgccaggacatcaaccatttgcgcaaaattattgatgtactcttttaacgacgcgccctcaggggaaacatccacatcgtggaagcaataaaatggcacatgtaacttgtggaaaaactcaaatgcgacatctgctttacgcttcgccaacgccagtgcctcaccaggctgctgccacggacgattaaacgcccccacaccaaacatatccgccccgttccagcagaaggtgtgccagtagcaggcggcaaaacgcaagtgctcttccatacgcttacccaacaccagttcgtcgggattgtagtgacggaatgctaacgggtttgaggattttgagccttcataacgaacgcgatcgagctggtcaaaataggcttgcatattgaactccataatcaggtaatgccgcgggtgatggatgatgtcgtaatattgggcactccctttcagttgctcaattatgttatttcacactgctattgagataattcacaagtgtgcgctcgctcgcaaaataaaatggaatgatgaaactgggtaattcctcgaagagaaaaatgcaataagtacaattgcgcaacaaaagtaagatctcggtcataaatcaagaaataaaccaaaaatcgtaatcgaaagataaaaatctgtaattgttttcccctgtttagttgctaaaaattggttacgtttatcgcggtgattgttacttattaaaactgtcctctaactacagaaggccctacaccatgaaaataaagaacattctactcaccctttgcacctcactcctgcttaccaacgttgctgcacacgccaaagaagtcaaaataggtatggcgattgatgatctccgtcttgaacgctggcaaaaagatcgagatatctttgtgaaaaaggcagaatctctcggcgcgaaagtatttgtacagtctgcaaatggcaatgaagaaacacaaatgtcgcagattgaaaacatgataaaccggggtgtcgatgttcttgtcattattccgtataacggtcaggtattaagtaacgttgtaaaagaagccaaacaagaaggcattaaagtattagcttacgaccgtatgattaacgatgcggatatcgatttttatatttctttcgataacgaaaaagtcggtgaactgcaggcaaaagccctggtcgatattgttccgcaaggtaattacttcctgatgggcggctcgccggtagataacaacgccaagctgttccgcgccggacaaatgaaagtgttaaaaccttacgttgattccggaaaaattaaagtcgttggtgaccaatgggttgatggctggttaccggaaaacgcattgaaaattatggaaaacgcgctaaccgccaataataacaaaattgatgctgtagttgcctcaaacgatgccaccgcaggtggggcaattcaggcattaagcgcgcaaggtttatcagggaaagtagcaatctccggccaggatgcggatctcgcaggtattaaacgtattgctgccggtacgcaaactatgacggtgtataaacctattacgttgttggcaaatactgccgcagaaattgccgttgagttgggcaatggtcaggaaccaaaagcagataccacactgaataatggcctgaaagatgtcccctcccgcctcctgacaccgatcgatgtgaataaaaacaacatcaaagatacggtaattaaagacggattccacaaagagagcgagctgtaagcgttacgccccagcgcggagcgggggcgtgatttctctccatgccgcgtgaatgaattggcttaggtggagtcgttatgccttatctacttgaaatgaagaacattaccaaaaccttcggcagtgtgaaggcgattgataacgtctgcttgcggttgaatgctggcgaaatcgtctcactttgtggggaacatgggtctggtaaatcaacgctgatgaaagtgctgtgtggtatttatccccatggctcctacgaaggcgaaattatttttgcgggagaagagattcaggcgagtcacatccgcgataccgaacgcaaaggtatcgccatcattcatcaggaattggccctggtgaaagaattgaccgtgctggaaaatatcttcctgggtaacgaaataacccacaatggcattatggattatgacctgatgacgctacgctgtcagaagctgctcgcacaggtcagtttatccatttcacctgatacccgcgttggcgatttagggcttgggcaacaacaactggttgaaattgccaaggcacttaataaacaggtgcgcttgttaattctcgatgaaccgacagcctcattaactgagcaggaaacgtcgattttactggatattattcgcgatctacaacagcacggtatcgcctgtatttatatttcgcacaaactcaacgaagtcaaagcgatttccgatacgatttgcgttattcgcgacggacagcacattggtacgcgtgatgctgccggaatgagtgaagacgatattatcaccatgatggtcgggcgagagttaaccgcgctttaccctaatgaaccacataccaccggagatgaaatattacgtattgaacatctgacggcatggcatccggttaatcgtcatattaaacgagttaatgatgtctcgttttccctgaaacgtggcgaaatattgggtattgccggactcgttggtgccggacgtaccgagaccattcagtgcctgtttggtgtgtggcccggacaatgggaaggaaaaatttatattgatggcaaacaggtagatattcgtaactgtcagcaagccatcgcccaggggattgcgatggtccccgaagacagaaagcgcgacggcatcgttccggtaatggcggttggtaaaaatattaccctcgccgcactcaataaatttaccggtggcattagccagcttgatgacgcggcagagcaaaaatgtattctggaatcaatccagcaactcaaagttaaaacgtcgtcccccgaccttgctattggacgtttgagcggcggcaatcagcaaaaagcgatcctcgctcgctgtctgttacttaacccgcgcattctcattcttgatgaacccaccaggggtatcgatattggcgcgaaatacgagatctacaaattaattaaccaactcgtccagcagggtattgccgttattgtcatctcttccgaattacctgaagtgctcggccttagcgatcgtgtactggtgatgcatgaagggaaactaaaagccaacctgataaatcataacctgactcaggagcaggtgatggaagccgcattgaggagcgaacatcatgtcgaaaagcaatccgtctgaagtgaaattggccgtaccgacatccggtggcttctccgggctgaaatcactgaatttgcaggtcttcgtgatgattgcagctatcatcgcaatcatgctgttctttacctggaccaccgatggtgcctacttaagcgcccgtaacgtctccaacctgttacgccagaccgcgattaccggcatcctcgcggtaggaatggtgttcgtcataatttctgctgaaatcgacctttccgtcggctcaatgatggggctgttaggtggcgtcgcggcgatttgtgacgtctggttaggctggcctttgccacttaccatcattgtgacgctggttctgggactgcttctcggtgcctggaacggatggtgggtcgcgtaccgtaaagtcccttcatttattgtcaccctcgcgggcatgttggcatttcgcggcatactcattggcatcaccaacggcacgactgtatcccccaccagcgccgcgatgtcacaaattgggcaaagctatctccccgccagtaccggcttcatcattggcgcgcttggcttaatggcttttgttggttggcaatggcgcggaagaatgcgccgtcaggctttgggtttacagtctccggcctctaccgcagtagtcggtcgccaggctttaaccgctatcatcgtattaggcgcaatctggctgttgaatgattaccgtggcgttcccactcctgttctgctgctgacgttgctgttactcggcggaatgtttatggcaacgcggacggcatttggacgacgcatttatgccatcggcggcaatctggaagcagcacgtctctccgggattaacgttgaacgcaccaaacttgccgtgttcgcgattaacggattaatggtagccatcgccggattaatccttagttctcgacttggcgctggttcaccttctgcgggaaatatcgccgaactggacgcaattgcagcatgcgtgattggcggcaccagcctggctggcggtgtgggaagcgttgccggagcagtaatgggggcatttatcatggcttcactggataacggcatgagtatgatggatgtaccgaccttctggcagtatatcgttaaaggtgcgattctgttgctggcagtatggatggactccgcaaccaaacgccgttcttgattttgataaaaattttctcaaagccggttacgtattaccggttttgagtttttgcatgattcagcaggaaaagaaccatgtttactaaacgtcaccgcatcacattactgttcaatgccaataaagcctatgaccggcaggtagtagaaggcgtaggggaatatttacaggcgtcacaatcggaatgggatattttcattgaagaagatttccgcgcccgcattgataaaatcaaggactggttaggagatggcgtcattgccgacttcgacgacaaacagatcgagcaagcgctggctgatgtcgacgtccccattgttggggttggcggctcgtatcaccttgcagaaagttacccacccgttcattacattgccaccgataactatgcgctggttgaaagcgcatttttgcatttaaaagagaaaggcgttaaccgctttgctttttatggtcttccggaatcaagcggcaaacgttgggccactgagcgcgaatatgcatttcgtcagcttgtcgccgaagaaaagtatcgcggagtggtttatcaggggttagaaaccgcgccagagaactggcaacacgcgcaaaatcggctggcagactggctacaaacgctaccaccgcaaaccgggattattgccgttactgacgcccgagcgcggcatattctgcaagtatgtgaacatctacatattcccgtaccggaaaaattatgcgtgattggcatcgataacgaagaactgacccgctatctgtcgcgtgtcgccctttcttcggtcgctcagggcgcgcggcaaatgggctatcaggcggcaaaactgttgcatcgattattagataaagaagaaatgccgctacagcgaattttggtcccaccagttcgcgtcattgaacggcgctcaacagattatcgctcgctgaccgatcccgccgttattcaggccatgcattacattcgtaatcacgcctgtaaagggattaaagtggatcaggtactggatgcggtcgggatctcgcgctccaatcttgagaagcgttttaaagaagaggtgggtgaaaccatccatgccatgattcatgccgagaagctggagaaagcgcgcagtctgctgatttcaaccaccttgtcgatcaatgagatatcgcaaatgtgcggttatccatcgctgcaatatttctactctgtttttaaaaaagcatatgacacgacgccaaaagagtatcgcgatgtaaatagcgaggtcatgttgtagcgatgatgagaattgtcggcgtcacatcaggtaacgctgcgtggttgtcggatgcggcgtgaacgccttatccgacctacccgccaggcatgataaaacgcaccaacaacgcttcaggctcgtagctcaactgcctgagacaaagtaaaaagccttatccgactgacaagtcggataaggctcaaggaaatgcaattacatatgcgccgcgattaaccgttggttatcctggtacattgcgaacaggtagttgttataactcttccctttggtcgagtagcccttcagcttgtgaatcatcgctgtggcagtcacttcctgatccgctttacgcagctgcgcacgcgatttacggaacgaagagtaagccgggtgcgtattcaggttagtgacataggcgctcaccgattctttgacagaactaaactgtgagtaccctttcactttacctggcgcattggtacaacgtcctttcatgcatttcatgccgaacaggttgttgttgttgcgcgccagcttcgacgttccccaaccgctttctgctgcagccatcgtcgccaccatactggtggggataatgtctacgcgttcaagcaaggtattccacgggatttttcgcgtattaccggaccacttcaccttgtagcgtttggcgatgtctttcagacgcgcacgctcagcaggtgaccattggccctgatactgttttgaaatgagccagttacgttccgcagtaatggccgcattttggctggtaatgtaaggcattacggtccggagaaacgcctttttccttggtgttccggaagggtattttcgcaaatcaggaagtgaactactctttgcactattgcgagaatactcttgtttactgcttacctgtttattactagctttagttaagtgggacttttgactcgctgttgttgtgtgcgtcttcgctaacacctcactcgaaaacaccagagtgagtaacataagaatcatcgccccatatcgtcgtatgggagtcaaaatcatcaggtctcctggtcggatttaatcattccaacaccttatatttttcacaaatttgagagttgaatctcaaatcatatcaaaaatagctgtcaagagcaccccaaggaatagtccaaatctgaaactatgtcacgtgttaacgattcagattggcgctaaatcgcagaaaatgtgggggttatcgcaaaattcagccgttttttgcgcgagatcgctcacccttgcttctcatcctgtggacttaccgctcagggatgagttttgtttggcttatcgctggcaaactgtctgaaatcgcagcaataaggactcatccgccatgaaactcgccgcctgttttctgacactccttcctggcttcgccgttgccgccagctggacttctccggggtttcccgcctttagcgaacaggggacaggaacatttgtcagccacgcgcagttgcccaaaggtacgcgtccactaacgctaaattttgaccaacagtgctggcagcctgcggatgcgataaaactcaatcagatgctttccctgcaaccttgtagcaacacgccgcctcaatggcgattgttcagggacggcgaatatacgctgcaaatagacacccgctccggtacgccaacattgatgatttccatccagaacgccgccgaaccggtagcaagcctggtccgtgaatgcccgaaatgggatggattaccgctcacagtggatgtcagcgccactttcccggaaggagccgccgtacgggattattacagccagcaaattgcgatagtgaagaacggtcaaataatgttacaacccgctgccaccagcaacggtttactcctgctggaacgggcagaaactgacacatccgcccctttcgactggcataacgccacggtttactttgtgctgacagatcgtttcgaaaacggcgatcccagtaatgaccagagttacggacgtcataaagacggtatggcggaaattggcacttttcacggcggcgatttacgcggcctgaccaacaaactggattacctccagcagttgggcgttaatgctttatggataagcgccccatttgagcaaattcacggctgggtcggcggcggtacaaaaggcgatttcccgcattatgcctaccacggttattacacacaggactggacgaatcttgatgccaatatgggcaacgaagccgatctacggacgctggttgatagcgcacatcagcgcggtattcgtattctctttgatgtcgtgatgaaccacaccggctatgccacgctggcggatatgcaggagtatcagtttggcgcgttatatctttctggtgacgaagtgaaaaaatcgctgggtgaacgctggagcgactggaaacctgccgccgggcaaacctggcatagctttaacgattacattaatttcagcgacaaaacaggctgggataaatggtggggaaaaaactggatcagaacggatatcggcgattacgacaatcctggattcgacgatctcactatgtcgctagcctttttgccggatatcaaaaccgaatcaactaccgcttctggtctgccggtgttctataaaaacaaaatggatacccacgccaaagccattgacggctatacgccgcgcgattacttaacccactggttaagtcagtgggtccgcgactatgggattgatggttttcgggtcgataccgccaaacatgttgagttgcccgcctggcagcaactgaaaaccgaagccagcgccgcgcttcgcgaatggaaaaaagctaaccccgacaaagcattagatgacaaacctttctggatgaccggtgaagcctggggccacggcgtgatgcaaagtgactactatcgccacggcttcgatgcgatgatcaatttcgattatcaggagcaggcggcgaaagcagtcgactgtctggcgcagatggatacgacctggcagcaaatggcggagaaattgcagggtttcaacgtgttgagctacctctcgtcgcatgatacccgcctgttccgtgaagggggcgacaaagcagcagagttattactattagcgccaggcgcggtacaaatcttttatggtgatgaatcctcgcgtccgttcggtcctacaggttctgatccgctgcaaggtacacgttcggatatgaactggcaggatgttagcggtaaatctgccgccagcgtcgcgcactggcagaaaatcagccagttccgcgcccgccatcccgcaattggcgcgggcaaacaaacgacacttttgctgaagcagggctacggctttgttcgtgagcatggcgacgataaagtgctggtcgtctgggcagggcaacagtaacttttccggcttcccgttcgtcagtacctcgggaagccgccaaccaggataaaatgtcagccctaatcagcgttgcaggataaagcaccgctcactcttcaacagaccgatttgcaccccagcaaatgtagcgttattgttaccttccttgctacagagttcgacagatatcccgctatgacattctccctttttggtgacaaatttacccgccactccggcattacgctgttgatggaagatctgaacgacggtttacgcacgcctggcgcgattatgctcggcggcggtaatccggcgcagatcccggaaatgcaggactacttccagacgctactgaccgacatgctggaaagtggcaaagcgactgatgcactgtgtaactacgacggtccacaggggaaaacggagctactcacactgcttgccggaatgctgcgcgagaagttgggttgggatatcgaaccacagaatattgcactaacaaacggcagccagagcgcgtttttctacttatttaacctgtttgccggacgccgtgccgatggtcgggtcaaaaaagtgctgttcccgcttgcaccggaatacattggctatgctgacgccggactggaagaagatctgtttgtctctgcgcgtccgaatattgaactgctgccggaaggccagtttaaataccacgtcgattttgagcatctgcatattggcgaagaaaccgggatgatttgcgtctcccggccgacgaatccaacaggcaatgtgattactgacgaagagttgctgaagcttgacgcgctggcgaatcaacacggcattccgctggtgattgataacgcttatggcgtcccgttcccgggtatcatcttcagtgaagcgcgcccgctatggaatccgaatatcgtgctgtgcatgagtctttccaagctgggtctacctggctcccgctgcggcattatcatcgccaatgaaaaaatcatcaccgccatcaccaatatgaacggcattatcagcctggcacctggcggtattggtccggcgatgatgtgtgaaatgattaagcgtaacgatctgctgcgcctgtctgaaacagtcatcaaaccgttttactaccagcgtgttcaggaaactatcgccatcattcgccgctatttaccggaaaatcgctgcctgattcataaaccggaaggagccattttcctctggctatggtttaaggatttgcccattacgaccaagcagctctatcagcgcctgaaagcacgcggcgtgctgatggtgccggggcacaacttcttcccagggctggataaaccgtggccgcatacgcatcaatgtatgcgcatgaactacgtaccagagccggagaaaattgaggcgggggtgaagattctggcggaagagatagaaagagcctgggctgaaagtcactaaaaattgcctgatgcgctacgcttatcaggcctacatgatttctgcaatatattgaatttggaagaatttgtaggccggataaggcgtttacgccgcatctggcataaacaaagcgcactgttccggcgttgagaaacgccggaaaacgtttcaaacaggctgctgccgtagccgatgccgctgcactttctcgacatccatgcactgcaacgcctttgtcgggcaggcttcaacacaggccggtcccgtctcccgatgccagcacagatcgcacttaatcgccctcgcctttttgcgcgaagaaacgacctccatcgcaccaaacgggcaagccagcatacagcttttacagccaatgcaacgtgtttgttcaacgaaaatatgcccatgttcgcggcttatcgcgtcaacagggcagacattcgcgcacggtgcatcttcacactgatgacaggctactgccgtggtccagcagtggtctttaatgacacgaatacgggaaataaactcgtctggtgacaacgcagcgcaatcctgattctcatgatgcgacactgcgcaagccacttcacaggtacggcaaccgatacatttcgtcgcatccgcaataataaaccggttcatgatcactcctttgcactaaaacagcagagtgccagagagcgcgtccctactgctttgatccaacgaaggaaatgttaaagttttggcacttgtccaaagcgttatgtgatcgcgcccaggtcatccctgacagtaaatcccagttcattagaaatagcctgcgcggtttcacgcagtggtttcaggagatttttctctcccacctgtttcagacgtgatgtcgaaagcgaaatcgacacggcgtacggcacccgcccatgaatatcaaacaccggaacagcaatacaggagacgccgagttcgttttcttctctgtccatcgccgctccgctttcacgaatgtgcgccagttcgtcgaacatcgcgggcagctcggtaatggtattgcgggttaacggctggatctcatgctgatggctttcccagtatgacttcacgtagtccgggtgaccaaacgccatgtagatcttgcccattgcggaacagtagagcggcatatgctggccaatataggcacgggttcgcagcatcccggttgtgggttccagcttataaatcaaaatagcgtgatcgtcttcgcggctggagaagttaatggtttcaccagtggcgatgttcagtgcctcaagatgcggagcggcgatatgaatgatattcagcgaagacagcgccttctgcccgacggcaataaatttggtggtcaggcgataactccctgcggcaggcgcggtggtcacatagccgcaggactgtaatccctgcaataagcgatggacggtactcttatttaaaccagccagctccgaaagatgcgccaacggacaaccgtttggatagttgctcaaaatctcaatcagcatcaacccgcgaaacagactctggcttccggctggacgctctttttcctgcgccatctcgttctctttttttcccatcacttctttccccattttgtcgcgtcctgatggtagcgcaaagtgtgccgtagttcacgatctcgacagataatttataaccaattgatttttatgtcttttgaaattcatcaatcagattgccttgttaaaaagtgatcgatatatttgaaatcaagtttcgcatattgaaattttaagccaaaaaagcgatcaaaaaaacaaggaagcctgggatgaaagtgacatttgagcagttaaaagcagcctttaatcgggtcttaatttcacgcggcgttgacagcgaaacggctgacgcctgtgcagagatgttcgcccgcaccaccgaatccggcgtttattctcacggcgttaatcgtttccctcgtttcattcaacaactggaaaacggcgatatcattcctgatgcccaacccaaacgtataaccagcctcggcgcaattgaacagtgggacgcccagcgttcgatcggtaacctgacagcgaaaaagatgatggatcgcgccattgaactggctgccgatcacggtattggtctggtggcactacgtaatgccaaccactggatgcgcggcggcagctacggctggcaggcggcggaaaaaggctatattggcatttgctggaccaactccatcgccgtaatgccgccgtggggcgcaaaagagtgtcgcataggcactaacccgctgatcgtcgccattccttccacgccgatcaccatggtcgatatgtcgatgtcgatgttctcttacggcatgttagaagttaaccgtctggcaggtcgtcagctcccggtcgatggtggctttgatgatgagggcaatttgaccaaagaacctggcgttatcgagaagaatcgccgcattttgccgatgggctactggaaaggttctggcatgtcgattgtgctggatatgatcgctactctcctttccgacggcgcatccgttgccgaagtcacccaggacaacagcgacgaatacggcatttcacaaatttttattgccattgaagtggacaagcttatcgacggtcccacccgcgatgccaagctgcaacgcatcatggattacgttactagtgccgagcgtgctgacgaaaatcaggccattcgcttacccggccatgaatttactaccctgctggccgaaaaccgccgtaacggcatcactgttgatgacagcgtgtgggccaaaatccaggcgttatgaggagataagtcatgatttttggacatatcgcgcagcccaatccgtgccgtttgcccgccgccattgaaaaggcgctcgattttctgcgcgctaccgatttcaacgccctggagccgggcgttgtcgaaatcgacggcaaaaatatttatacgcaaattatcgatttaaccacacgcgaagcggtggtaaaccgtccggaagtgcatcgtcggtatatcgatattcagtttctggcgtggggcgaagagaaaatcggcattgctattgatacgggaaataataaagtcagcgaatcactattagagcagcgcaatattattttttatcacgacagtgaacatgaatcatttatagaaatgataccgggcagctacgcaattttctttccgcaggatgttcaccgaccaggttgtattatgcaaacagcctctgagatacgaaaaattgtggttaaagtcgcattaacggcgctgaattaatcgaataatcgtctacgccagaacgcctgggtaatgttattgctctaactatattaataattcaggttgctgcacatgcgacttgaattatgacagacatagcctcaaggaatagctatgaaaaaaatactcgaagcaatactggcgattaatctcgccgtactttcctgtattgtatttataaacattattttaagatatggttttcagacaagcattttatctgttgatgaattgtcacgttatttatttgtctggttaacgtttattggcgcgattgtagcttttatggataacgcccacgttcaggtcacctttctggtggagaaactctcccccgcatggcagcgacgagtcgctctggttacccattccttaatcttatttatttgtggcgcactggcctggggcgcaacgctaaaaacaattcaggactggagcgattattcaccgatcctcggtttacccatcggcctgatgtatgccgcttgtctgcccaccagcctcgttatcgcattctttgaactgcgtcatttatatcaactcatcacgcgtagcaattctctaacgtcgccaccgcaaggagcttaatcatggctgtgctgatttttctgggctgtctgttgggtggtattgctatcggtttgcctattgcctgggcactgttgttgtgcggggcggcgttaatgttctggctggacatgtttgatgtccagatcatggcacaaacgctggtgaacggagccgatagcttctccctgctggcgattccgttctttgtgctggcgggtgaaatcatgaatgcgggcggcttgtcaaaacgcattgttgacctgccgatgaaactggtggggcataaaccaggcgggctgggctacgtcggcgtgctggcagctatgattatggcgagcctttctggttctgccgttgcggataccgccgccgttgccgctctactggtgccgatgatgcgcagcgccaactatccggtcaaccgggcggcggggctgattgcctctggcggcattatcgcgccaattattcccccttccattccgtttattatcttcggcgtttccagcggattatccatcagtaagctgtttatggcgggcattgcccctggcatgatgatgggcgcaacgctgatgcttacctggtggtggcaggccagtcgccttaatttaccccgccagcaaaaagcaacgatgcaggaaatctggcactcttttgtctccggtatctgggcgctgtttcttccagtcatcattattggcgggtttcgctccggcctgtttacccctaccgaagccggggccgttgctgctttctatgcgctgtttgtcgccacagttatttaccgtgaaatgaccttcgccacactttggcatgtactcattggcgcggcgaaaaccacctcagtggttatgtttctggtggcctcggcacaagtttccgcctggctgattaccattgctgaactgccgatgatggtttctgatttactgcaaccgttggtcgattcaccgcgtctgctgtttatcgtcattatggtggctatcctgattgtcggcatggtcatggatttaacgccgacggtattaattcttaccccggtattaatgcctttagttaaagaggcaggaatcgatccgatttatttcggtgtcatgtttatcattaactgctcaatcggcttaattacaccgcctatcggtaatgtacttaacgttatttcaggggtggcaaaactcaaattcgatgatgcagtcagaggcgttttcccttacgtcctggttttatattcattattagtcgtatttgtttttattcccgatctcatcatcctccctttgaaatggattaattaaaaggaaaatattatgaaattacgctctgtaacctacgcattattcattgctggcctggctgcattcagcacatcttctctggcggcacaatctttacgtttcggttatgaaacatcacaaaccgactcgcaacatattgcggcgaaaaaattcaatgatttattgcaggagagaaccaaaggcgagctgaaattaaaactgttcccggacagcactctcggtaacgcgcaggcgatgatcagcggcgtacgtggcggcaccatcgatatggaaatgtccggctcgaataactttgccgggttatcaccagtgatgaacttgcttgatgtccctttcctgttccgcgataccgctcacgcgcataaaacgctcgacggcaaagtcggtgatgatctgaaagcctcacttgaaggtaaaggactgaaagtactggcctactgggaaaacggctggcgcgatgtcaccaactcgcgcgcaccggttaaaacccccgccgacctgaaagggctgaaaatccgcaccaacaatagcccgatgaatatcgccgcattcaaagtctttggcgctaacccgatcccgatgccgtttgccgaagtctataccgggctggaaacccgcactatcgacgctcaggaacacccgatcaacgtcgtctggtcagcaaaatttttcgaagtgcagaagttcctttctctgacgcaccacgcctattccccgcttctggtggtgatcaacaaagcgaagtttgatggcttaagtccggagttccagcaggcgctagtttcatctgcacaagaagcgggtaactatcagcgcaaactggttgctgaagatcagcaaaaaatcatcgacggcatgaaagaagcgggcgtggaagtcatcaccgatctcgaccgcaaagcctttagcgacgcactggggaatcaggttcgcgacatgtttgttaaagatgtgccgcagggagctgatctgctgaaagccgtggatgaggtgcaataaaccatgacgcaatactggctggggttagattgtggcggtagctggctgaaagccgggctgtatgaccgcgaaggccgggaggcaggcgtgcagcgcctgccgctgtgcgcattaagcccgcagccaggctgggcagagcgcgatatggcagaactgtggcaatgctgcatggctgtcattcgcgccctgcttactcattctggtgttagcggggaacaaattgtcggtatcggcatctccgcacagggaaagggcttgtttttgctggataaaaacgacaaaccgctcgggaatgctattttgtcctcggaccgccgggcgatggaaatcgttcgtcgctggcaggaagatggcatcccggaaaaactctacccgctgacccgacaaaccttgtggaccgggcatccggtgtcgctgttacgctggctgaaagagcacgaaccagaacgctacgcgcaaattggctgcgtgatgatgacgcacgactacctgcgctggtgtttaactggcgtcaaaggctgtgaagagagcaatatttccgagtccaacctctacaacatgagtcttggggaatatgacccgtgcctcaccgactggctggggatcgctgaaatcaatcacgccctgccgcctgttgtcggatctgccgaaatctgcggggagatcaccgctcagacagccgccctgaccggtctgaaagcgggtacgcccgttgttggcggcctgtttgatgtggtttccaccgcactctgcgccgggatcgaagacgaatttaccctcaatgcggtgatggggacctgggcggtgaccagcggcataacccgcggtttacgtgacggtgaagcgcatccgtatgtctatggtcgctacgttaacgatggtgaatttatcgttcacgaagccagccctacctcttccggcaacctcgaatggtttaccgcacagtggggagaaatctcgtttgatgagatcaatcaggccgttgccagcttgccgaaggctgggggcgatctctttttcctgccgttcctgtacggcagcaacgccggactcgagatgaccagtggtttctacgggatgcaggccattcacacccgcgcgcacctgttgcaggccatctatgaaggggtggtgttcagccatatgacccacctcaaccgaatgcgcgaacgttttactgatgttcacaccctacgcgtcactggcggcccggcgcactccgatgtctggatgcaaatgctggcggacgtcagcggtctgcgtatcgagctgccgcaggtggaagaaaccggctgctttggtgcggcccttgccgcccgcgtcggcaccggggtttatcacaacttcagcgaagcccaacgtgacttgcgacacccggtgcgcaccctgctgccagatatgaccgcccatcagctttaccaaaaaaaatatcaacgttatcagcatctcattgccgcacttcagggctttcacgcccgcattaaggagcacacattatgagccgaccacttctgcaactggccctcgaccactcatcacttgaagccgcgcagcgcgacgtgacgctgttaaaagacagcgtcgatatcgtcgaagcgggcaccattctctgtttaaacgaagggcttggcgcggtgaaagccttgcgcgaacagtgcccggacaaaatcatcgttgctgactggaaggtcgccgacgctggtgaaacgctcgcgcaacaggcgtttggcgcaggcgctaactggatgaccatcatctgcgccgcgccgctcgcgacggtagaaaaaggccacgcaatggcacaacgctgcgggggtgaaattcagatagagctgttcggtaactggacgctggacgacgcccgcgactggcatcgtattggcgtgcggcaggccatttatcatcgcggtcgtgatgcacaggccagcgggcaacagtggggcgaagccgatctggcacgcatgaaggcgctttcagatatcggccttgagctttccattactggcgggattacccctgctgacctgccgctgtttaaagatatccgcgtgaaagcgtttattgccgggcgggcactggcaggcgcggcaaatccggcgcaagtggctggcgatttccatgcgcaaatcgacgctatctggggaggtgcgcgtgcgtaatcatcagttagggatttatgaaaaagcgctggcgaaagatctctcctggccggagcggctggtgctggcaaaaagctgcggttttgattttgtcgaaatgtcggtggatgaaaccgacgaacggctctcacgtcttgactggagcgccgcacaaaggacttcgctggttgccgcgatgatcgaaacaggtgttgggatcccgtcgatgtgcctgtccgcacatcgtcgctttccctttggtagccgtgacgaggcagtgcgcgaacgggcgcgggaaatcatgagtaaagcgattcgcctggcgcgcgatctcggcattcgcaccatccagctggcaggttatgacgtctattacgaagaccacgacgaaggcacccggcaacgttttgctgaagggctggcgtgggcagtcgaacaggcggcggcatcacaagtaatgctggcggtggagattatggataccgcgtttatgaactccatcagcaaatggaaaaaatgggacgagatgctcgcctcaccgtggttcaccgtctacccggacgtcggcaacctcagcgcctggggcaatgatgttcccgccgaactgaaactgggcattgaccgtatcgccgcgatccacctgaaagacacccagccagtcaccgggcaaagtcccggacagttccgcgacgtgccgtttggcgaaggctgcgtcgatttcgttggcatcttcaaaacgctgcataaactgaactatcgcggttctttcctgattgagatgtggaccgaaaaagccaaagagccggtgctggagattattcaggcgcggcgttggattgaagcgcgtatgcaggaggctggatttatatgttagagcaactgaaagccgacgtgctggcggcgaatctggcgcttcccgctcaccatctggtgacgttcacctggggcaatgtcagcgcggtagacgaaacgcggcaatggatggtaatcaaaccttccggcgtcgagtacgacgtgatgaccgccgacgatatggtggtggttgagatagccagcggtaaggtggtggaaggcagcaaaaaaccctcttccgatacaccaacgcatctggcgctctaccgtcgctatgccgaaattggcggtattgtgcatacccactcgcgccacgccaccatctggtcacaggccgggctggatctccccgcctggggcaccacccacgccgattatttttacggtgccatcccctgcacgcgacagatgaccgcagaggagattaacggcgaatatgaatatcagaccggcgaagtgatcattgaaaccttcgaagaacgtggcaggagtccggcacaaatcccggcggtgctggtgcattctcacggcccgttcgcatggggtaaaaacgccgccgatgccgtgcataacgccgtagtactcgaagaatgcgcctatatgggtctattctcgcgccagcttgcgccgcagctccctgcgatgcaaaacgaactgctggataagcactacctgcgtaagcatggggccaatgcctattacgggcagtaatccctcacgccggggcttcatcgccccggcactacgaattgatatgttccttgctgtaacgccgcttccacgctgctggcgttaaaccagtatgtttctgaaaaatctgccggaaatagccaacgtcattaaaccgtattgcatggagcaggccgacaacgtcgagtcactgcataacctgttgctgcccgccgatgcgccatttacgacatttgaaggcaagggattgttcagccataagatcctgattcagacgccaggttcccggtatgaacagagcaatccagagcaacaacctttgtggcattacgacggagcaccagccgcaccgacatccaccggtgaattaaaaacgccagctcaccccggtgacaaaggtaaaactctcattacgatcaatcatcgggctgtcggtaatctcttccggcagctcgctgtatcctgcgctcgccatcaatacgacgtgctctcctatcgggtattttgccgtcaggctgacatagggcacccaggcatcctgcgcggaataacttgccagaccgctacgacgggactcactctctgaaatgccatagtaatagtcactgaaattctcgtcataatagagaacgcccagcgcaggtgtcagcgacagacgacctatctgcattttgtggaataccgatagctcccccacccagccgttgctgttatccagaacgtccgcagctgcagaggctttcacggttccccaacgctcgtggtgataccaggcaacccccgccatagccgtactatcacgcttatcaagctgttgcatggcataatcgtcattatcggtagggtcaaattccagcggcatccaggatgcggtcaggctaagttcatttttttcactttgcgacagaataaaacctaacgtggtctgacgaacataaaaagtatcaccttcataactaatcagcggaattgccttcgtattttcattataaccgcgataaggcgattcattataagccgcaccagcaccaatggataattcagaagcagttgcgcttgccataaaaggcaacgcaaataacgccacaatattgcgattaattaacatgtccggtattccattttaaaataagataaaaaagagtcggcataataatgcttacaatttctccggtgcaagattcatatttatatagtaatatataaaattatatataattgggctgttgcgatgacaaaattacaacttaagtaccgggagttaaaaattatctcggtaatcgctgccagtgaaaatatcagccatgccgcgactgtacttggcatcgcacaggccaacgtcagcaaatatcttgctgattttgaatcaaaagtgggtttaaaagtctttgaccgaaccacccggcagctgatgctcacaccttttggcaccgcgctgttaccgtacatcaacgacatgctggacagaaacgagcaacttaataattttattgcagattataagcatgagaaacgtggtcgggtcaccatctacgccccaaccggcataattacctatttatccaaacatgtaatcgataaaattaaagatatcggtgatatcaccttatcgctaaaaacctgcaatcttgagcgtaatgccttttatgaaggcgtcgaatttcctgatgattgtgatgttttaatcagctacgctccaccaaaagatgaatcgctggttgccagttttattacccaatatgccgtaaccgcttatgccagccagcgctatcttgagaaacatcccattagccgtcctgacgaactcgaacatcactcctgtattttgatcgactcgatgatgatcgacgacgcgaatatctggcgcttcaacgtcgccgggagtaaagaggtgcgggattatcgcgtgaagggaaattacgtttgcgacaacacgcaatctgcgctggagctggcacgaaatcacctggggattgtgtttgcgccagacaaaagtgtgcagagcgacctgcaagacggcacgctggtgccctgctttcagcaaccctatgaatggtggctggatctggtggctatcttccgtaaacgggaataccagccctggcgggtccagtatgtgctggatgaaatgctgcgtgaaattcgccaccagcttgctcagtcgcagcaactgcggcctgaacaagcggcggaaagcgaagattaatgatcgagataaaggtaatgcacccagctggtcatgcgtaatagcactttgcgcatcaccgagacatggctgaaatgatcagagtaaaccgccacctgggcgtaaataccgtctggtaaagcgctcaaatcagtgtgctcatccagttcaatggtcgcgataacgccatctgaacccggcgctgtgtttaacgtctgtaaggtgccggtcgactgataagctccgccgggaacggctggactaatggctgccagcttaccgctgaataccttacctggcagagcattaaacaccacttccgcatcgtcgccaggagccagtcgcagcaaggagttctgacggaactgcgccacgatttgtcgtttctgatcgggtataaacaccatcaccggacgtagcggcagcgacgcggcataggtacccggacgaatcagtacctgggtcacataaccatcgctcggcgcacgcactatcgtctgctcaaggttatattttgcttccgcgagctgtgctttcaggctggcgatttgagaatgttcacccaacaccaggctatccagctggctctggatctgtttttgttccgccgccgatgacttcacggaggcttcctgcgccagataattttgccgcgccacatcgatatcgcgttctgaaaacgggtttactttcgcctggctgccacgtgcgtaacgctgatactctttagcgaatttatcccgcgtggcctttgcctgctgagtattcgccgccatctcatctaactctgcgcccaacgcccgctgtttatgttctgcggtaacgatatccgccatcagccgatccacccgcgcctgataacgcgtcgggtccagtcgaaatagcacctcaccttttttaatcagcgtatttttcttatccgtcacttcaatcaccacaccagtcacctgtgggacaacaggaatagaaataaccgctttttgcgctttaaaggtatacggatggttatagttcattaacagaattagaccgctgacaataaatattccacccagggccgctgtgggaatggtccatttatttacgggaattttgaagatcttaaacattgcccatgcaaaagccacataggtcaaaataatcagtaaatccataagtattactcggcagaagaggatttgatgtcggcgagctgtttctccagcccggcaatgcgctgttgcagttgcataacggatgaatcatggctttgcattccccatccccgctccgggcggtaaagcgtggcccaaatccacaaaaacggccagataacatgtaacgtaaaaagactcacccaaccagcaacatgaatggcgtcggcatgaggatgattacgttttttggcaatcaggtagggaatatcatgtaaaataatgatcccatagaagatcaccagaaatacaaaaataagcactcccagtgcaaaatagtccaggaacatatttccctcaaagaatataaaaaagaacaattaacgcatattatgaaatgccatgatgcagtgcaatttccttatttatataacgacatattgttttttatatactttcttaaatgtgctgtctggtttttcaacaggacgaggtttatcatattgaaatagtggaactattggccaaactaatgaataactccagtaaaacatccacagtacagattaagcgtattaaaccttcaattatctaccgtttattgctgattggcctcggatcaccaatggtgatttacggcctggttcgcccgctcaccatcgaaacgcgagattaaactcctgacaaaacacgccccagaaacgtacttctgttggcgtagtctgggttattgcgcacgtaggtttaaaacgtaaattgtaacaacgtgcgctttgtttatgccggatgcggcgtgtacgccttatccggcctacggtcaggttcccgtaggcatgataagacgcgtaagcgtcgcatcaggcaatgaatacccaatgcgaccagcttcttatatcagaacagccccaacggtttatccgagtagctcaccagcaggcacttggtttgctggtaatgctccagcatcatcttgtgggtttcgcgaccgatacctgattgtttgtagccaccaaacgccgcatgtgccgggtaagcgtgataacagttggtccacacgcgcccagcctgtatgccgcgccccatcttataggccagattaccgttgcggctccagacgcccgcgcccaggccatattgcgtatcgttcgccagctccagcgcttcttccatcgttttgaaggtggtcaccgccagcaccgggccaaaaatctcctcctggaacacccgcatattgttctgaccaaacagaatcgtcggttcgaggtagtagccgtctttcagttcaccttccagcagcttgcgccgcccgcctgtgagcacgtcagcgccctcttttttaccgatatcaatgtagttgaggatggtttccagttgcccgtgagaaacctgcgcgcccatttgcgtcacgctgtcgagcgggttaccgctacgaatgctttcgacacggcggatggcgcgttccataaagcgttcgtagatagattcctgcactaaagcacgactcggacaggtgcaaacttcgccctggttaaaggcaaacagtgcaaagccttccagcgctttatcgaaaaaggcatcttcttcatccatcacatcagcaaagaagatatttggcgacttaccgcccaactccagcgtcaccggaataatgttttgcgttgcgtattgcataatttgttggcccacttccgttgagccggtaaacgccactttggcgatgcgtttcgaggtcgccagatattcgccaattaccccacctgcgccattgaccacgttcaccacgcccggcggcagtaaatcaccgacaatttccattagcagcagtacagaaagcggggtaagacgtgcgggtttcagcaccacacagttgcccgccgccagcgcgggagccattttccagctcgccatcagcagcgggaagttccacgggataatctgccccaccacgcctaacggttcatggaaatgataggccacggtttcgctatcaacttcactgatcccaccttcctgcgcccgaatacacgaggcgaaatagcggaaatggtcaatcgccagcggtacatccgcagcactggtttcgcgaatgggtttgccgttatcccaggtttcagctgtcgctaacagctcgaggttttgttccattcgatcggcaatcttaaacagaatcgccgcacgatcctgcaccgaggtgtgcgcccatttatctttcactttgtgcgcagcatccagcgccagatcgatgtctcgtttgcccgaagacgccacttcgcacagcagctgcccggtcaccggcgtcagattctggtaatactcgccgtcggcaggggctacccattcgccgccaataaagttgtcatagcgggcttttaacttgagggggaaaccatactcgccgggcttaatctgtgctgaagggggattattggtcatgatcgtctccttgcggtgtgaggtataacaagggtagacgtgactggcgaaatcttcgccagtcggtaacagctttacgacagctatcacgaatttacgggcaagggttacagagatagttgaaaaagcggctaacaatttgccagccgttgtggaaatgatgattacatcgctgcgcgataaatcgccacaatttcttcgtgagttgcctggatcgggttagtaaagccacaggcatctttcagggcattagtcgccaataccgcgaaatcttcttctttcacgttcaggtcgcgtaggcctgccgggatatccactttcttcgccagttcacggatggcgttaatgcaggcttcagcaccttccgcgtcgtttttacctgtcacgttcacgcccattgcagcggcacagtcacgcagacgtgcagcggcgactttgctgttgaatacctgaacgtgcggcagcaaaacggcgttacatacaccgtgtggcaggttgtagaaaccgcccagctggtgcgccatcgcatgaacataacccagagaagcattattgaacgccataccggcgaggaactgggcataagccattgcttcacgcgctttcgcattactgccatcttcaacggctaacggcaggttttcggcaatcatggtcacggctttcagtgcacaagcgtcagtgatcggcgtggcggcaatagaaacatatgcttcgatagcgtgcgttaaggcatccatacccgttgcggcggtcagtgacttcggcataccaatcatcagagaggagtcattgacagaaagcagcggagtgacatgtttatcaacaatcgccattttgatatgacgcgcttcgtcagtgatgatgcagaaacgggtcatttcagaggccgtacccgccgtggtattgatggcgatcatcggcagctgcggttttgcagagcggtcaacgccttcgtaatcgcgaatatcgccgccattggctgccaccagcgcaataccttttgcgcagtcgtgtggagaaccaccgcctaaggagatcacgctatcgcaattattctctttaagtaatttcaaacctgcggcgacgttttccgtggtggggttaggttgggtgccatcataaataacgctaaaaatattgcgttcttccagtgctttttgcacatcgcccgccatacctaatttcgttaacatattgtcagtgacaattaaggtacgggtaaatccataatctgccatcatattcattgcatcagtcaatgaatcagcgccgatgacattcacagaaggaataaagaacgttgaagctgccataacacactcctgaaagtgtaaaaaagggcgggcagcttactgaggattttcattcgaaaatatgatcagtattattgattatcaaaattaatctaataaaaagcacattgtattcattaaacaatgtgctttttttaaattcataagaattttgtattaatttattttaaaacttaattaatcatttccttatttttccggaaataataatgcgtcgcgcaataaatgatcatttccacgacgacgcgtaaagccaatgcggtcaaaatattccagaatctgaattgccagctttcggcctacgcctaagcgatcgcggaaatccgccgcgcaggttgaaccacactcctgatcgagatcgcggatcatattggcaaactcgacaatccgatcgttacggtaataacgatctttaacgatcgcggtaattattccttgctgcgccgcctggcgtagagtcaggcgcattgcctgctcgtcggttcccgtctcttttgccaggtcacgcacccaccacggttcgtcaccaaacagtggctctgctttttgccagatggcctgctgctcttcgctgaagcccgctttgtgatctggcagatgcagccagccgtgatggctgtggatgtcgccgctttcgcgcatcttttcaatcagcaacagtaccagcgcttcatcttccattggcaacgccatacgtcgcagacgttcgcgcccagggccaggttcatcgcgatgttgctcatgataagtcgctaatgtgtcgagaattttccgctgccagcgggcggcaaccggcgcattcaacaagctataaccagcctgaatataaccaggctgttgcagcaattcgcgcatcccttcgccgttgagctggcgcgcccaggcgaaatccgcaaggttaaccgcgccgcgttccagatgaacagataacgcatcggcatcgctctgcgcccgtgcaagagacgccagccattgcagatattccggcttacgtttaccgcgacgcggcgggttaagcatcacgacgcgcgctccggccagcgtgttgcgggcagagatatcgcgcaataccaggcggtcgttatctgccagccataacggggtgtcgaagaccagttcagcaaggttatcttccagcagtgaaacgcgtcccgtgacgtggctggcggcgtggtgaatatgcagcggctgccactgggtcagcggtgtatgggtttgaagctcgacaatcacccgtgtgaacggctctggcggcacatcggcaagcagccagtcgccacggttaatctgctctttttccgcatcacccgcgatgttaagcgcgatacgctgcccggcattggcggtttctgttggctggttttgcgcatgcagcgcacgtacacgcatcggtttatttacaccagtcagccagagtgaatcgcctaccttcacttccccgcttaacgccgtaccggtgacgaccagcccggcaccttttacggtaaatgcgcggtcaatcgcgaggcggaaactatgttggctggcgtgctcgcgttccggcaactgaagcagatgctcgcgcagggcatccattccccgaccttcggttgctgcggtgataaacagttttgcctcagcaaaaccgtattcccgcagaacctcctttacctggcgttcaacctcatcaacacgcgcttcgtccacgcgatcggctttggtcagcgccactgtcagcatcgggttaccggtcagctgcaaaatcgccagatgctcacgggtctgtgccatcacgccgtcatcgcacgccaccaccaacagcgcgtgatcgataccaccaacgcccgccagcatgttggaaagaaacttttcatgaccgggaacgtcgataaaaccaggcacgcgaccatccggctgcggccagtaggcatagccgagatcgatggtcatgccgcgctttttttcttccggcagacggtcagcatttacgccagtaatcgcctgcaataaggttgttttgccgtggtcaacgtgtccggcagtcgcaataatcatttcaacaacatctccaaaaaccgttgctcatcttcaaggcagcgtaaatccagccacaatcgtccgtcataaatacgaccaatcaccggcactggcaattcacgccagcgggcggctaatgactcaaggtggctaccgcgtccatcatggggtgtaaacgttaatgccgcgctcggcaggcgatcaaccggcagcgaaccactgccaatctgcgaaagacatggcataacctgtaccgcaaactccgcgccgtaatgtgcggcaaggggggcctgtaaacgttgtgcctggatttgaatgacctctgcgctgcgggtaagcaggcgcagggtcggtaatttttcactcagagcttcagggtgtaaataaagacgcaacgtggcttccagcgccgcgagggtcattttatccgcgcgtaatgcacgcttcagcgggtggctttgcaggcgggcgatcatctcttttttaccaacaataattcctgcctgcggcccgcctaacaacttgtcgccggagaaactcaccagactgacgcccgccgcaatcaactcctgcggcattggctctttcggcaaaccgtactggctaagatcgaccagcgagccactgcctaaatcagtcactacgggaacatccagctctttgccgagcgccaccagttccgcttcatctatcgctttggtgaacccctgaatgctgtagttactggtatgtactttcatcaacagtgcggtattttcattcaccgcctgacgataatcattcgcgtgcgtgcggttggtggtccctacttcgtgtagggtgcagcctgcctgacgcataacatcgggaatacgaaacgcgccgccaatctccaccagttcgccgcgagataccaccacctcttttccgctggcagtggccgccaacatcaataacaccgccgccgcattgttattgacgatacaggcatcttccgcccccgtaatacggcacagcagctgcgccagcgcccgatcgcgatgtccgcgtccggcgtcgtccagatcatactcgagggtcactggcgaacgcatagcctgcgcaacggcttccaccgcggcttccgcctgtaaagctcgcccaaggttggtatgcagcacggttcccgtcaggttgatcaccggacgcagcgcgctctgcgcttctttcgtcaaccgggcatcgacttcttgcgcccagttttcacaccacgcaggcagcgtctggctgccacgaatcacttctcgcgcttcgtcgagcatctgacgcaacaattccaccacgcgggtgtgaccataagtatcacgcaaagaaaggaaggagctatcgcgcaataagcgatcaatagccggaagttgactatagagggaacgcgtttcggttgtcataggaaacctggctgatcaaggccctctcacacggagaagggcgtttaacataaccacggattgtaacgtgagatgggtcaggaggacatatcgcgcatcaagcctttggcggttcggtgcgagcaaaactttcgcggctaaacaggttttcgaccagtttgactaagtgtgggcggtcgacacaccaacctggcgcaacgcggcggaaattgagatatccgacggcacaggcaatggcgatagtcgccagattgaccgtatcggttttgagtgtgccatcgaccagatatccttccagcacatccagactgcggttgattttctcccgctggcgtaacaattcatcttcagactgctgcgccgctggacgcgcctgttcacgcaccgataccagcccggcatccataatgccatccgccagtgcctcaattttgcgcacccgcaacgactccagcggatcgcgcggcaacatcgccggagcgacattcattaattcaatatattcagcgatgatcggcgaatcaaaccagcattcgccctcttcggtcaccagcaccggcacttttcctaacgggttaaattgcgccacgccgttgtccgcgttatagggcagttcattaataaattcgaaagttatgcccttttctaacaacagaatagaaagtttgcgtacaaacgggctggtgtagctaccgacgagtttcatgccgagtcctttgtgcgaggaaaaatatcagtatggcctggtgatgggaaaaagggcagaaaatgttgatggtttgttacttccaaataaatcacatatttatcatggtgatataaatattttcctaattatttcactctgatggatatctcacttcaggctttcttataaatctgtagggtttcgcctgtcagcagacaaataacccgataaaacaaggatgagaaatgagcggaaaaccggcagcgcgtcagggcgacatgacgcagtatggcggtagcattgttcagggttcagccggggtgcgcattggtgcccccaccggcgtggcctgttcggtgtgccccggcggagtgacgtccggccatccggtcaatcccctgctcggtgcaaaggtccttcccggtgaaaccgacatcgccctgcccggcccgctgccgttcatcctctcccgcacctacagcagttaccggacaaaaacgcccgcgccggtggggagcctcggccccggctggaaaatgcctgcggatatccgcttacagctgcgcgataacacactgatactcagtgataacggcggcagaagcctgtattttgagcacctgtttcccggtgaggacggttacagccgcagcgagtcactgtggctggtgcgcggcggcgtggcgaaactggatgaaggtcaccggctggccgcactctggcaggcgctgccggaagaactccgcttaagtccgcatcgttatctggcgacaaacagtccgcaggggccgtggtggctgctcggttggtgtgagcgggtgccggaagcggatgaggtgctgcctgcgccgctgccgccgtaccgggtactgaccgggctggtggaccgcttcgggcgcacacagacgttccaccgcgaagccgccggtgaattcagcggcgaaatcaccggcgtgacggatggtgcctggcgtcacttccggctggtactgaccacgcaggcgcagcgggcagaagaagcccggcagcaggccatttccggcgggacggaaccgtccgcttttcctgataccctgccgggttacaccgaatatggccgggacaacggcatccgtctgtctgccgtgtggctgacgcacgacccggaatacccggagaatttacctgccgcgccgctggtgcgctatggctggacgccacgcggcgaactggcggtggtgtatgaccgtagtggcaaacaggtgcgcagctttacttacgatgataaataccggggccggatggtggcgcaccgtcacacgggccggccggaaatccgttaccgttacgacagcgacgggcgggtgacagaacagctaaacccggcaggcttaagctacacgtatcagtatgagaaagaccgcatcaccatcaccgacagcctggaccgccgtgaagtgctgcacacgcagggcgaagccgggctgaagcgggtggtgaaaaaggaacacgcggacggcagcgtcacgcagagtcagtttgacgccgtgggcaggctcagggcacagacggatgccgcaggcaggacaacagagtacagcccggatgtggtgacgggcctcatcacgcgcataaccacgccggatggcagggcatcggcgttttactataaccaccacaaccagttaacgtcagccaccgggcctgacgggctggaattgcgccgggaatatgatgaattgggccgtctgattcaggaaactgcccctgacggcgatatcacccgctaccgttatgataatccacacagtgacttaccctgcgcaacggaagatgccaccggcagccggaaaaccatgacgtggagccgttacggtcagttgctgagcttcaccgactgttccggttatgtaacccgttatgaccatgaccgcttcgggcagatgacggcggtgcaccgcgaggaagggctgagtcagtaccgcgcatacgacagccgtggacagttaattgccgtgaaagacacgcagggccatgaaacgcggtatgaatacaacatcgccggtgacctgaccgccgtcattgccccggacggcagcagaaacgggacacagtacgatgcgtggggaaaggccgtccgtaccacgcagggcgggctaacgcgcagtatggaatacgatgctgccggacgggtcatccgcctgaccagtgaaaacggcagccacaccaccttccgttacgatgtacttgaccggctgatacaggaaaccggctttgacggccgcacacagcgttatcaccacgacctgaccggcaaacttatccgcagcgaggatgagggtctggtcacccactggcactatgacgaagcagaccgcctcacgcaccgcaccgtgaagggtgaaaccgcagagcggtggcagtatgacgaacgtggctggctgacagacatcagccatatcagcgaagggcaccgggtggcggtgcattacaggtatgatgagaaaggccggctgaccggtgagcgtcagacggtgcatcacccgcagacggaagcactgctctggcagcatgagaccagacatgcgtacaacgcgcaggggctggcgaaccgctgtataccggacagcctgcccgccgtggaatggctgacctacggcagcggttacctggcaggcatgaaactcggcgacacaccgctggtggagtacacccgcgaccgcctgcaccgggaaacgctgcgcagcttcggccgttatgaactcaccaccgcttatacccctgccgggcagttacagagccagcacctgaacagcctgctgtctgaccgcgattacacctggaacgacaacggcgaactcatccgcatcagcagcccgcgccagacccggagttacagctacagcaccaccggcaggctgaccggcgttcacaccaccgcagcgaatctggatatccgcatcccgtatgccacagacccggcaggtaaccgcctgcccgacccggagctgcacccggacagcaccctcagcatgtggccggataaccgtatcgcccgtgacgcgcactatctttaccggtatgaccgtcacggcaggctgacagagaaaaccgacctcatcccggaaggggttatccgcacggatgatgagcggactcaccggtaccattacgacagtcagcaccggctggtgcactacacgcggacacaatatgaagagccgctggtcgaaagtcgctatctttacgacccgctgggccgcagggtggcaaaacgggtgtggcggcgtgaacgggacctgacgggctggatgtcgctgtcacggaaaccgcaagtgacctggtacggctgggacggcgaccggctgaccacaatacagaacgacagaacccgcatccagacgatttatcagccggggagcttcacgccactcatcagagttgaaaccgccaccggtgagctggcgaaaacgcagcgccgcagcctggcggatgcgcttcagcagtccggcggcgaagacggtggcagtgtggtgttcccgccggtgctggtgcagatgctcgaccggctggaaagtgaaatcctggctgaccgggtgagtgaggaaagccgccgctggctggcatcgtgcggcctgaccgtggagcagatgcaaaaccagatggacccggtgtacacgccggcgcgaaaaatccacctgtaccactgcgaccatcgcggcctgccgctggcccttatcagcaaggaagggacaacagaatggtgcgcagaatacgatgaatggggcaacctgctgaatgaagagaacccgcatcagctgcagcagcttatccgcctgccggggcagcagtatgatgaggagtccggcctgtattacaaccgccaccgctattatgacccgctgcaggggcggtatatcactcaggatccgattgggctgaaggggggatggaatttttatcagtatccgttgaatccagttacgaatacagatcctctggggttagaagtttttcctagaccattccccttgccaattccatggcccaaaagccctgcacagcagcaagcagatgataatgctgcaaaagcattgacaaaatggtggaacgatacagcatcacaaagaatatttgactctctaatattgaataatccgggactagcattagatataacaatgatagcttctcgtggaaatgttgcagacacagggataactgatcgtgtcaatgacataataaatgacagattctggagtgatgggaaaaaacccgacagatgtgacgtacttcaggaactaattgattgtggtgatattagtgctaaagatgcaaaaagcacacagaaagcctggaattgtcgtcactccagacagtcaaacgataaaaaaagatagcccttgtggaggttcctgcaatgtcaaatacataccagaaaagaaaggcaagtaaagagtatggtttatataatcaatgtaagaaactaaatgatgatgaattatttcgcttacttgatgatcacaattccttgaaaaggatttcatctgccagagtattacagttaagaggtgggcaagacgctgttagattggcaattgagttctgctctgataaaaattatatccgtagagatatcggagcatttatactcgggcaaataaaaatttgcaaaaaatgcgaagataatgtttttaatattttgaacaatatggcattgaatgataagagcgcttgcgttcgagctacggcaatcgagtcaacggctcagcgatgcaagaaaaacccaatttattcacctaaaatagtagaacaatctcaaattactgcttttgataaatcgactaatgtcagacgtgctacagcatttgctatttctgttatcaatgataaagcaacaattccactattgattaatctgttaaaagatccaaatggagatgtcagaaactgggccgcatttgcaataaatatcaataaatatgataatagtgatattagggattgttttgtggagatgcttcaggataaaaatgaggaagtccgtattgaagcaataatcggactttcctacagaaaagataaaagggttttatctgttttatgcgatgagttaaaaaaaaatactgtttatgatgatatcattgaagctgcgggtgaattaggtgataaaacgctacttcctgttttagatactatgttgtacaagtttgatgacaatgaaattataacttccgctattgataagctgaagcgttcatagcgtgagttgcctatgcacagtgggggattcccgccggcacggtgcagatgctcgaccggctggaaagtgaaatcctggctgaccgggtgagtgaggaaagccgccgctggctggcatcgtgcggcctgaccgtggagcagatgaaaaaccagatggacccggtgtacacgccggcgcgaaaaatccacctgtaccactgcgaccatcgcggcctgccgctggcgctcatcagcacggaaggggcaacagcgtggtgcgcagaatatgatgaatggggcaacctgctgagtgatgagaacccgcatcatctgcagcagctcattcgcctgccgggtcagcagtatgatgaggagtccggcctgtattacaaccgccaccgctattatgacccgctgctggggcggtatatcactcaggatccgattggactgaaggggggatggaatttttatcagtatccgttgaatccggtcataaatgtagatccgcaaggtttggttgatataaatttataccccgaaagtgatcttatccattctgtagctgatgagattaatatcccaggcgttttcacaatcggggggcatggtacccccacatctattgaatccgcaacgcgcagtatcatgacagctaaagatctagcatatctaattaaatttgatgggaattataaagatgggatgacagtttggttattttcttgtaatacaggtaaaggacaaaattcatttgctagctaattagctaaagagttacatacaaatgtaataggacctgacacgctatggacgtggtgggggcgaggaactaatggtaagttaaaaatggatacagtgctaacagcaccaacgaaccttaattcaaataaggatctaatggctataacaacaaaagaccttggtaattggataacatatgggccatctgggcaccccatttctaatatgcaaggtacgccagaaaaacccagtgatataagataggttgtagatgtatgaaagcatgcttgttactatttttttatttctcttttatttgtcaattgcatggtgctgatgtgaaaataaaacaaaacgaaagtatgatggggtctacagcaatgacctatgatttaagtgaagaaaagttgatgaaactgaagtataaatcacaacatggtgattcagaggcatcatttcgactatatcaatattactgctttactaaaaataacatttacaaacaattgcgattcttggaaagatcagcatctcaggggaatgttacagcgcagtttaattatggggtctttttatcagatacaaatccaacattatcagaatattataatttgaatagagctatttattggatggaattcgctgtaaataacggtaatattgatgcaaagagcaaacttcaagagctcaaaaagctaaagcgaatggatagaaggaagaataaggagaatccgtaaaagcaatagttcatcagactgccgcagcagtagtatgatgatgaatcagggctgtactataactattatcggtaacattaaccgcagcaggggcggtataacactcaggctccgattgggctggaaggtaggtggaatttttatcagtatccgttgaacccgatttctggaatcgatccccttgggattagccacctgtttatacagcataactttaggtatgctttcgtgtgtttcagatataccatgtgatgataatttttatgatgtgcttagtattccagtcgcttctggtaataatatgcaatgtaaaaataatccccgttgtacacatttataaatagatggccaatacctcaaggcctatggagttggaatgttaatgacccgggagcaagcaatagaaaacctgacggcatacgattagtaccgtcagttaatacaggaacttataatcgcaatggattttcaatacatagttgtttaaacgcttttggtccgtctttaggacctcgattctgttccgagggttgtataactggtttatctaatgacatgcaaaaattaaatgagttaatattttcagagccagatagcacattaacagttacggactaaaaaatatggcaaggttattaacaattgtatttttttctctatttctgcgagtgcagttactgcaagacaatttcagagagagttagatttggcagacaaagcaatattatgggcactaatatcagccagtactaaagagggacgaaaagcgtgttcactaagctattttgcctgtaaggccgcagaggctgaactcggactggcatatatggctgcgaatgataacaaggaatttctcacatccttatctaatataatgaggtacaaaatagatgctggactttccgaatcctatacatgctatttattaagtaagggaaagatcataagaccatatctgaaaaatctaaatccactccaacttgccgctgattgcattgaaacagtaaataaaataaaagataagaataaaaaaaatcattgatataaattcagttaatatttgtagtgatgataaaaatataaaattgagagttaatagtactattatggccattgatgattctataaagtgcatcgatgaatgataacttaattttatttaaaaatatattaataactcactctccaggagtttttttaacttagttttataatgaatacgataattaaaagtgaagaagaaaatagttgtatacatatattccatgaccctacattgtgatctatagattaaatattttttaaatgtgactgtcatccttcagataataaagccatcatcgcaatagatggaaaagcactcctgctcttttttgattagagccgtcgcaggaggaacaactcatatcatcattgcgatctcgacgatgtatagtctcatcctgcggcagaacaagacggataaaaaatccaatgagagcacactcatccagaacttattaacataatgaatattaaagaaaaatcatcgaagctaatgaagtaatatgcaaaaataattagtccttacaaggagcaaagttccataatctcccccctccccctcaatgatccaaataaagataatgcatccagctggtcattcttagcagcactttccgcatcaccgaaacatggctgaaatggtcggagtaaaccgccacctgggcgtagatgccgtcgggtaaggcatcgatatcatcgttagggtccagttcaatggttcccagcacaccgtccgtgccgggcacgaccgttaatgattgcaataccccctgcgcctgataagaaccgcctggcacgacaggtaaaatactagtcagtttgccgtgaaacacctgcccaggtagcgcgttaaacaccacttccgcatcatcgccaggtttcagacgtaacagcgagttttgccgaaattgggcgacaatttgccgtttttgctcggggatgaagaccatcaccggacgcagcggcaaggcagctgcgtatgtacctgggcggatcagtacctgagtaacgtagccattgctcggcgcgcgaatgacagtctgctcaaggttatattttgcttcagtaagttgcgctcttaagctcacaatctgcgattgctcgccgttaaccatactgtcgagctggctctggatctgcgcctgctccgccaccgagcctttcaccagcgcatcctgcgcgaggaaattttgccgcgcatcgtcgatgtcacgttccgagaacggattcaccgccgcctggctgcctttcaagtaacgttgataatttttaaacagacggtcgcgctccgctgaaacctgggtggtgttggcctgcgcttcagtgagctgcgcacgcagcgtctttatattatgcgtcgccgtcatcaggtcagcctgaagtctgtcaactcgcgcctggtaacgaaccgggtcgagcttaaaaagcacctcgcccttttgaataagctgattattcttgtcagtgacttcagtaacaattcccgtcacctgtggcgtgatagggatcgctatcactgccttttgcgcggtaaaagtgtaagggtggttgtagttcatcaacaaaatcaaaccactcaccagaaacacgcctcccagcgccgccgtcgccagcgtccactgatttaccggaatgcggaagattttaaagaccgcccacgccagcgccacgtaagttaaaacaatcaatagatccataattagatctccgggaacgtggaatagtcagtctttttctcggcggcgagttgatgctccagccgggaaattcggtcagaaagtgcggcgatttccgggtcagtcgctttctcctgcgacgcaacatgtgactgcataccccagccacgctccggttgatagagcgtcgcccagatccacagaaacggccagataacatgcagagtaaacaggctcacccagcccgccgtatgaatagcgtcggcatggggatggttgcgctttttggcaatcagataagggatgtcatgtatcgcgatgattccataaaaaatcaccagaaagacgaagatcagcactcccaacgcgaaatagtttagaaacatatctgcctcggattcacgtttatcagtgttgtttttgggctggcagccagaagggagtcaggctgatattttgacaataatccgggttcgcgattctcgccataacaccaaagaataatttttagaggtgatgagttgcttagttacataacgattgtatgacgaaggcataacatgctgtagatcacatcaggtgaacgccgtaagaaaatatcttgtgattcagatcacaaagattcaacaaaccatcaaaacaaaaatgtgacactactcacatttaaatgccatttttagcgaaaatcgccgccttgttgcttttttacacaagcgttttgtgatgaacgtcacgtcaattacctctctaccccctatatttatgtgattgatatcacacaaaaggccgtcgactggacagttaaccgattcagtgccagatttcgcagtatctacaaggtccggctacctctgccgccacattaacaaaaaacctcgggcttccagcctgcgcgacagcaaacataagaaggggtgtttttatgtcatccgatattaagatcaaagtgcaaagctttggtcgtttcctcagcaacatggtgatgccaaatatcggcgcgtttatcgcgtggggtatcatcaccgcgttatttattccaacagggtggttaccgaacgagacgctggcgaagctggtcgggccgatgatcacttatctcctgccgctgctgatcggttataccggtggtaagctggtaggcggcgaacgtggcggcgtagtcggtgccatcaccaccatgggcgttatcgtcggcgcagacatgccgatgttcctcggttctatgattgcaggtccgctgggcggctggtgcattaagcacttcgaccgctgggtagacggtaagatcaaatccggttttgagatgctggtgaataacttctccgcaggcatcatcgggatgatcctcgctattctggcattcctcggcattggcccgattgttgaagccctgtccaaaatgctggctgcgggcgttaacttcatggttgtccatgacatgctgccgctggcgtctatctttgttgaaccggcgaaaatcctgttcctcaacaacgccattaaccacggtatcttctcgccgctgggtattcagcagtcccatgaactgggtaaatcaatcttcttcctgattgaagctaacccaggtccaggtatgggcgtgctgctggcgtacatgttctttggtcgtggtagcgctaaacagtctgcgggcggtgcggcaatcatccacttcctggggggtatccacgaaatctacttcccgtatgtgctgatgaatccgcgtctgatcctcgcagtcatcctcggcggtatgactggcgtgttcacgctgactatcctgggcggtggtctggtttctccggcatctccgggttctatccttgctgtactggcgatgacaccaaaaggtgcttacttcgctaacatcgcgggtgtgtgtgcggcgatggctgtctccttcgttgtctctgctattttgctgaaaaccagcaaagtgaaagaagaagatgatattgaagcagcaactcgtcgtatgcaggacatgaaagctgagtctaaaggcgcatctccgctgtctgctggcgatgtgactaacgacctgagccacgtacgtaaaatcatcgttgcctgtgacgccggtatgggttccagtgcgatgggcgcaggcgttctgcgtaagaaaattcaggatgcaggtctgtcgcagatttctgttactaacagcgcgatcaacaacctgccgccagatgtggacctcgtcatcactcaccgtgacctgaccgaacgcgctatgcgccaggttccgcaggcacagcatatttcgctgaccaacttcctcgacagcggcctgtacaccagcctgaccgaacgtctggttgctgcccaacgccacacggcaaacgaagagaaagtaaaagacagcctgaaagacagctttgacgattccagtgctaacctgttcaagctaggcgcggagaacatcttcctcggtcgcaaagcggcaaccaaagaagaagcgattcgttttgctggcgagcagctggtgaaaggcggttacgttgagccggaatacgttcaggcgatgctggatcgtgaaaaactgaccccgacttatctgggtgagtctatcgcggtgccacacggtacggttgaagcgaaagatcgcgtactgaaaacgggcgtcgtgttctgccagtacccggaaggcgtgcgcttcggtgaagaagaagatgacattgcccgtctggtgattggtattgctgcccgtaacaacgagcacattcaggttatcaccagcctgaccaatgcactggatgatgagtccgtcatcgagcgtctggcacacaccaccagcgtggatgaagtgctggaactgctggcaggtcgtaagtaatccaatcccaccctctccacatggagaaggtggggttaattgcctgatgcgctacgcttatcaggcctacaggatgcatcacaatttgttgaatttgcacgttcttgtaggccggataaggcgcttacgccgcatccggcgctgcccctctcctcacggagagggtttgggtgagggaaaagcctcaccccagccctctcgggtaaaaacattgatgaaggttaatactatgaaagcattacattttggcgcaggtaatatcggtcgtggctttatcggtaaactgctggcagacgcgggtatccaactgacgtttgccgatgtcaatcaggtggtacttgatgccctgaatgcccgtcatagctatcaggtacatgtggttggtgaaaccgagcaggtagataccgtttccggcgtcaatgctgtcagcagcattggtgatgatgtcgttgatctgattgctcaggttgatttagtcactaccgccgttggcccggttgtgctggaacgtattgctccggcaatcgccaaagggcaggtgaaacgtaaagaacaaggtaatgaatccccgctgaacatcatcgcctgtgaaaacatggtacgcggtaccacgcagctgaaaggccatgtgatgaacgccctgccggaagacgccaaagcgtgggtagaagaacacgttggctttgtcgattccgccgttgaccgcatcgtaccgccttcggcttcggcaactaacgatccgctggaagtgacggtagaaaccttcagcgaatggattgtcgataaaacgcagttcaaaggcgcactgccgaacatcccaggcatggagttaaccgacaacctgatggcatttgtcgaacgtaaactcttcaccctgaacacgggtcatgctataaccgcgtacctcggaaaactggccggtcatcagaccattcgtgacgcgattctcgacgagaaaatccgcgcggtggtaaaaggtgcgatggaagaaagtggtgcagtattgatcaagcgctacggctttgacgctgacaagcatgcggcgtacatccagaaaattctcggccgttttgagaacccgtatctgaaagatgatgtagagcgcgtaggccgtcagccactgcgtaaactgagtgctggcgaccgtctgatcaagccactgctcggtacgctggaatatggtctgccacataaaaacctgattgaaggtattgccgctgcaatgcacttccgcagtgaagatgatccgcaggctcaggaactggcagcactgatcgctgacaaaggtccgcaggcggcgctggcacagatttccggtcttgatgccaacagcgaggttgtatccgaggcggtaaccgcttataaagcaatgcaataatggtggaccaggcgcaggacaccctgcgcccgaataacagattgtcagatatgcaggcaacaatggaacaaacccaggcctttgaaaaccgtgtgcttgagcgtctgaatgctggcaaaaccgtgcgaagctttctgatcaccgccgtcgagctcctgaccgaggcggtaaatcttctggtgcttcaggtattccgcaaagacgattacgcggtgaagtatgctgtagaaccgttactcgacggcgatggtccgctgggcgatctttctgtgcgtttaaaactcatttacgggttgggcgtcattaaccgccaggaatacgaagatgcggaactgctgatggcattgcgtgaagagctaaatcacgacggcaacgagtacgcctttaccgacgacgaaatccttggaccctttggtgaactgcactgcgtggcggcgttaccaccgccgccacagtttgaaccagcagactccagtttgtatgcaatgcaaattcagcgctatcaacaggctgtgcgatcaacaatggtcctttcactgactgagctgatttccaaaatcagcttaaaaaaagcctttcaaaagtaagcaacgtctgcttactgcccctctacctgcttcggccgataaagccgacgataatactccagacgttgtagatataacggcacgctttcatcgggtattccggacggaatcgcgttacggggaggaagttttttcagatactcccggaacgcctggcttgatgccatgaaatctacggctttatcgataagaagcggaacgttttcacctaatttgcccatgatgatatctccgtattaccccgcgccgggaatgcgcggccgccaattttagtttaggttcccggtaaagatgacattaaggaaaacgtgctgaatcctcaataatcatccgctgctgtttattatcttttttctatagatttcttaattaatcaacgaattgcgcagtttttgagcatgttaatgattacgttacagaactattacaatgtcattagttgtgaacaaagcacctggtcgcgcatactaggggctataaatttatctttatcagaagccatcacatgaaagaagtcgaaaaaaacgaaatcaaacgcctcagcgatcgcctggacgccatccgccaccagcaggccgatctttcgctggttgaagccgcagacaaatatgccgagctggaaaaagagaaagccacgctggaagcagaaattgctcgcctgcgtgaagttcatagccaaaaactgagtaaagaagcacagaagctgatgaagatgccattccagcgcgcaattaccaaaaaagagcaggctgatatgggcaagctgaagaaaagtgttcgcggactggtcgttgtgcacccaatgaccgcactgggccgcgaaatgggcctgcaggagatgactgggttttcaaagaccgcgttttaagaacacagtatctacagggtgattctgcacattcctataggccgagtaaggtgttcacgccgcatccggcaagataaggcgctctggatcaacaacctaagggcaattctctgatgaggattgcccttttctttaccagacatctccccccacaagaattggccctaccaattcttcgcttatctgacctctggttcacaatttcccaattaaaactcacatcaatgttgccaatacataacatttagttaaccattcattgtcattatccctacacaacacaattggcagtgccacttttacacaacgtgtgacaaggagatgagcaacagactcattacacgatgtgcgtggactccaggagacctgcaatgaatctctggcaacaaaactacgatcccgccgggaatatctggctttccagtctgatagcatcgcttcccatcctgtttttcttctttgcgctgattaagctcaaactgaaaggatacgtcgccgcctcgtggacggtggcaatcgcccttgccgtggctttgctgttctataaaatgccggtcgctaacgcgctggcctcggtggtttatggtttcttctacgggttgtggcccatcgcgtggatcattattgcagcggtgttcgtctataagatctcggtgaaaaccgggcagtttgacatcattcgctcgtctattctttcgataacccctgaccagcgtctgcaaatgctgatcgtcggtttctgtttcggcgcgttccttgaaggagccgcaggctttggcgcaccggtagcaattaccgccgcattgctggtcggcctgggttttaaaccgctgtacgccgccgggctgtgcctgattgttaacaccgcgccagtggcatttggtgcgatgggcattccaatcctggttgccggacaggtaacaggtatcgacagctttgagattggtcagatggtggggcggcagctaccgtttatgaccattatcgtgctgttctggatcatggcgattatggacggctggcgcggtatcaaagagacgtggcctgcggtcgtggttgcgggcggctcgtttgccatcgctcagtaccttagctctaacttcattgggccggagctgccggacattatctcttcgctggtatcactgctctgcctgacgctgttcctcaaacgctggcagccagtgcgtgtattccgttttggtgatttgggggcgtcacaggttgatatgacgctggcccacaccggttacactgcgggtcaggtgttacgtgcctggacaccgttcctgttcctgacagctaccgtaacactgtggagtatcccgccgtttaaagccctgttcgcatcgggtggcgcgctgtatgagtgggtgatcaatattccggtgccgtacctcgataaactggttgcccgtatgccgccagtggtcagcgaggctacagcctatgccgccgtgtttaagtttgactggttctctgccaccggcaccgccattctgtttgctgcactgctctcgattgtctggctgaagatgaaaccgtctgacgctatcagcaccttcggcagcacgctgaaagaactggctctgcccatctactccatcggtatggtgctggcattcgcctttatttcgaactattccggactgtcatcaacactggcgctggcactggcgcacaccggtcatgcattcaccttcttctcgccgttcctcggctggctgggggtattcctgaccgggtcggatacctcatctaacgccctgttcgccgcgctgcaagccaccgcagcacaacaaattggcgtctctgatctgttgctggttgccgccaataccaccggtggcgtcaccggtaagatgatctccccgcaatctatcgctatcgcctgtgcggcggtaggcctggtgggcaaagagtctgatttgttccgctttactgtcaaacacagcctgatcttcacctgtatagtgggcgtgatcaccacgcttcaggcttatgtcttaacgtggatgattccttaatgattgttttacccagacgcctgtcagacgaggttgccgatcgtgtgcgggcgctgattgatgaaaaaaacctggaagcgggcatgaagttgcccgctgagcgccaactggcgatgcaactcggcgtatcacgtaattcactgcgcgaggcgctggcaaaactggtgagtgaaggcgtgctgctcagtcgacgcggcggcgggacgtttattcgctggcgtcatgacacatggtcggagcaaaacatcgtccagccgctaaaaacactgatggccgatgatccggattacagtttcgatattctggaagcccgctacgccattgaagccagcaccgcatggcatgcggcaatgcgcgccacacctggcgacaaagaaaagattcagctttgctttgaagcaacgctaagtgaagacccggatatcgcctcacaagcggacgttcgttttcatctggcgattgccgaagcctcacataacatcgtgctgctgcaaaccatgcgcggtttcttcgatgtcctgcaatcctcagtgaagcatagccgtcagcggatgtatctggtgccaccggttttttcacaactgaccgaacaacatcaggctgtcattgacgccatttttgccggtgatgctgacggggcgcgtaaagcaatgatggcgcaccttagttttgttcacaccaccatgaaacgattcgatgaagatcaggctcgccacgcacggattacccgcctgcccggtgagcataatgagcattcgagggagaaaaacgcatgattatttccgcagccagcgattatcgcgccgcagcgcaacgcattctgccgccgttcctgttccactatatggatggtggtgcatattctgaatacacgctgcgccgcaacgtggaagatttgtcagaagtggcgctgcgccagcgtattctgaaaaacatgtccgacttaagcctggaaacgacgctgtttaatgagaaattgtcgatgccggtggcactggctccggtgggtttgtgtggcatgtatgcgcgtcgtggcgaagttcaggcagccaaagcggcggacgcgcatggtattccgtttactctctcgacggtttccgtttgcccgattgaagaagtcgcgccagccatcaagcgcccaatgtggttccagctttatgtactgcgcgatcgcggctttatgcgtaacgcgctggagcgagcaaaagcagcgggttgttcgacgctggttttcaccgtggatatgccgacaccgggcgcacgctaccgtgatgcgcattcaggtatgagcggcccgaacgcggcaatgcgccgctacttgcaagcggtgacacatccgcaatgggcgtgggatgtgggcctgaacggtcgtccacatgatttaggtaatatctcagcttatctcggcaaaccgaccggactggaagattacatcggctggctggggaataacttcgatccgtccatctcatggaaagaccttgaatggatccgcgatttctgggatggcccgatggtgatcaaagggatcctcgatccggaagatgcgcgcgatgcagtacgttttggtgctgatggaattgtggtttctaaccacggtggccgccagctggacggtgtactctcttccgcccgtgcactgcctgctattgcagatgcggtgaaaggtgatatagccattctggcggatagcggaattcgtaacgggcttgatgtcgtgcgtatgattgcgctcggtgccgacaccgtactgctgggtcgtgctttcttgtatgcgctggcaacagcgggccaggcgggtgtagctaacctgctaaatctgatcgaaaaagagatgaaagtggcgatgacgctgactggcgcgaaatcgatcagcgaaattacgcaagattcgctggtgcaggggctgggtaaagagttgcctgcggcactggctcccatggcgaaagggaatgcggcatagtcgtttgcgccccctcaccctaaccctctccctcagggagaggggaccgttcggcgctgtatgtactccctcactctgaaacgacaccgcactctttttttctccctcgcccctccggggagagggccggggtgaggggaaaaggccgcactgctcaccaattttctgctatcctgcccccgcactaagggggcagtatgctaaacatcgtactttacgaaccagaaattccgccaaatactggcaacatcatccgtctttgcgctaataccggctttcgtctgcatatcatcgaaccgatgggatttgcctgggacgataagcgcctgcgccgcgcggggctggactatcacgagtttaccgccgttacgcgtcatcatgactatcgcgcgttcctcgaagcagaaaatccccagcgcctgttcgccctcaccacgaaaggtacacctgctcacagcgccgtaagctatcaggatggcgattatctgatgttcggcccggaaacacgcggcctgccagcgagcattcttgatgccctgcccgctgaacaaaaaattcgcattccgatggtgccggacagccgcagcatgaatctgtccaatgcggtgtcggtagtggtgtatgaagcctggcggcagttggggtatccgggagcggtattgagagattagttactgtaggccggatagatgattacatcgcatccggcacgatcacaggacattagatcccatccccatactcaaatgtatggttaataccgttgaaatgctggtccatatccattgatggcttatcgctgtctggtttaccgacaatacgagccggaacgccagcggcggtggtatgcggcggcaccggttgcagcaccacggaacctgcgccaatcttcgcgccgcgcccaacttcaatattgccgaggattttcgcgcccgcgccaatcatcacaccttcacgaattttcgggtgacggtcaccaccagatttacccgtaccgccaagcgtcacagattgcagaatcgatacgtcgttttcaatcaccgccgtttcaccaacgacgatgcctgtcgcgtggtcaagcatgataccgcgaccaatttttgctgccgggtgaatatcgacctggaacgtcacagaaacctggttttgcagaaagattgccagtgcgcgacgcccctgattccacaaccagtgaccgatgcgataggcctgcaaggcatgaaaacccttcaggtataacaacggggttgagtatttatcgactgccgggtcgcgggtacgcaccgcctgaatatcacaggccgcagaggcgatcatttccgggtcagcggcgtaggcttcttccaccacttcacggatagcaatagcaggcataattggcgatgacagcttgttcgccagcatgtagctcagtgcactgccaaggttttcgtgcttgagtagcgtcgcgtggtaaaaactggccagcattggctcacagtccgccagcgttctggcttcggctttaatattgttccagacaatttccagttcttcacacgacattgcttactccacacgatgagataatgaccggcccgttctgcgcgggccgggtcatagcggtaacaaaggttccctggggttagtggctgctgcgctcgtccttgcgtgcacgacctagtaaagtcaatgctgcctcgcgcgcgttttttccgcaatataatacttgataaatttcctcggttattggcatttcaacgccgaagcgatgcgccagttcgcggacttctttcgtattgcggtagccttccaccacctgaccaatcttctcctgcgcgctttgtacatccatgccctgaccgagcatcatgccaaaacggcggttacgcgactggttgtcggtacaggtaagcaccagatcgccaagccccgccatgcccataaaggtggcagggtcggcacccagcgccgcaccaagacgcgacatttcagccagcccacgggtgatcagcgccgtacgcgcattcgcaccaaaaccgataccgtcggacatccccgcaccaatggcaataacgtttttcaccgcgccgccaagctgcacgccaatgaaatccggattgctgtaaacgcggaaacttttgccgcagtgcagcagctgctggagatcatcggcaaaggtctgatcggtcgaggccagcgaaatagctgtcggtaaacctgccgccagttctttcgcaaacgttgggccagagataaccgccagcggaatttgatcgcctaaggcctcacgcgccacgtcctgtaacagacgtccggtttccgcttccagccctttggtcgcccacaccagacgcgcatcaggacgcatcagtggtttaatctggcgcagcacttcaccaaagacatggctgggtacgacgacgagaatattacggctggctgccagcgcagtggcgagatcgctttcaagatggagcgtatcgggaaaaggcacatcggggagaaacgcggcgttacagcggtcgcgttcaagcgttgcgatatgttcagggtcatggccccagaggacaacctcgtggccatttcttgccagggtgatggcaagagcggtgccgtacgagccggcaccgatcacagtcattgaagcattacgttggttcatcaggcatcctgatgttcttcagtaccttcgccagcctgctgctgcaaatagttcatgaacagcgcatcgaagttaaccggcgcaaggttcagttgcgggaatgtaccgcgggataccatgctggtgatgcactcacgagcatacgggaacagaatgttcgggcagtatgctcccaggcaatgcgccatctgggtgccttcgatacccgcgatggagaaaataccgccctgctgaacttcacacaggaacgcggtttcttcgcccaaagaggccgttacggtaacacgcagtaccacttcgtatacgtcatctgccagttgggaagatgccgtatccagatcaagtttaacttctggttgccaatctttctggaaaacgtgcggcgcgttcggcgcttcgaaagagatatccttggtataaatacgttggatctggaaagtcatttcagtgttgttttgttctgacatgtgtagaaaacccttaagtgttgtccttaaatactgcgcaatgtaatgccaacgttcacacgttatttcagcaggggatccagtccaccacgtgcatccaatgcatacaagtcatcacagccgccaatgtgctgtgcgtcaataaaaatctggggaaccgtggtgcgaccgctgcgtttgatcatctcttcacgcttggcggcgttgccatcgatcggcagctcctggaaactcacgcccttgctgctcagcagtgcttttgcacgatggcaatacgggcaggtttctttggtatagatttcaacattggccataaattagctcctgtttttttaccctgaaatttcatgttgcagggcggcagcaaaatggagtgtccccagaagcttataacaataagtcgctgggggcctaattgcagctaacggcctgcatcatgaaagacgacaggtaaattatttgccgcgcaccaaaggcaagttttcgccagcccagccagcgacgccttctttcagcacgaatacttgcgcaaaaccagctttcgtcagtgcgtttgcaggctcctggcactgcatgccagaaccgtctaccacgataaccggtttgtctttgtgcttctcaagctcaccaacattgttggctttgatttcgctcggcaacagattaatagaacctgcgatatggcctttacggaagtcatcacgctgacgtaaatccacaaccacagcgtcttctttgttgatcagacgcgtagcttcaccacgagtaatcaccttcactttcgaggtcaggctcttaaacgtagtcacaagaaccgccaccagtaacgcgatccaggcgatactcagtatgggatgacggccaacaaattgcataatttcttgcatggggggtaacaactcccgacgtagtgattaaaaaaaccaggaaaggagtatacctgcgcggtgcggcaaatacagccagcgcgttaactggaatgcaattttgcggggcgcgacgaaaaaaaagcgtaaatctggcatcggcttgccgcgagcggtcgtatattttgatcttcagaggctattttatcgattcagctgtagtaaaattacgcaaattttgactcttgagtatgaggttgtcgcaatgttggtttctaaaaaacctatggtactggtgattctggatggctatggctatcgcgaagaacagcaggataacgccatttttagtgctaaaaccccggtaatggatgcactgtgggccaatcgtccgcataccctaatcgacgcttccggtctggaagtcggtctgcctgaccgtcagatgggtaactccgaagtaggccacgttaacctgggtgccggccgcatcgtgtatcaggacctgactcgtctggacgttgaaatcaaagatcgcgctttctttgctaatccggtgctgactggcgcggtagataaagcgaaaaacgcaggcaaagcggtacacattatgggtctgctctccgcaggcggcgtacacagccacgaagatcacatcatggcgatggtagaactggcagctgaacgcggcgcagaaaaaatctacctgcacgcattccttgacggtcgcgacactccgccgcgcagtgctgaatcctcgctgaaaaaattcgaagaaaaatttgccgcgctgggcaaaggccgcgtagcgtccatcattggtcgttactacgcgatggaccgcgataaccgttgggatcgcgtagaaaaagcttatgacctgctgactctggcgcagggcgagttccaggccgataccgccgttgctggtttgcaggctgcttatgctcgcgacgaaaatgatgaattcgtgaaagcgaccgttatccgtgctgaaggtcagccagacgcggcaatggaagacggcgatgcactgattttcatgaacttccgtgctgaccgcgcgcgtgaaatcactcgtgctttcgtgaacgctgatttcgatggcttcgcgcgtaagaaagtggttaacgtcgatttcgtgatgctgaccgaatacgccgctgacatcaaaactgcggttgcttacccacccgcttccctggttaacaccttcggcgagtggatggcgaaaaacgacaaaactcagttgcgtatttccgaaaccgaaaaatatgcccacgttactttcttcttcaacggtggcgtagaagagtcgttcaaaggcgaagatcgcattctgatcaactcaccgaaagtggctacctacgatctgcaaccggaaatgagctccgcagagctgaccgaaaaactggttgcggccatcaagagcggcaaatacgacaccatcatctgtaactatccgaacggcgacatggtaggtcacaccggggtgatggaagcggcggttaaagcggttgaagcgctggatcactgcgtggaagaagtcgcgaaagcggttgagtccgtgggtggacaactgctgatcaccgctgaccacggtaacgctgagcagatgcgcgatccggcaacgggtcaggcacacacggcacacaccaacctgccagttccgctgatttacgttggtgataagaacgtgaaagcggttgaaggcggcaaactttctgacatcgcgccgaccatgttgtcgctgatgggtatggaaatcccgcaagagatgactggtaagccgctgttcatcgtggaataatccctccccatgaggggaaaggcgattaataccatgacacgggccgtgaaaccgcgcaggtttgcaatcaggcccatcatctacgccagcgttcttagcgctggcgtattgttgtgcgccttttccgcccacgcggatgagcgtgaccaactcaaatctattcaggctgacatcgccgcaaaagagcgcgcggtacgccaaaagcaacaacaacgcgcaagcctgctcgcacaattgaaaaagcaggaagaagcgatctctgaagccacccgtaagctgcgcgaaacgcaaaacacgctcaatcaactcaataaacagattgatgagatgaacgcgtcgattgccaaactggagcagcaaaaagccgcccaggagcgcagcctcgccgcacaactggatgccgcattccgtcagggcgagcataccggtattcagctgattctcagcggtgaagaaagccagcgtggacagcgtttacaggcttatttcggctatctcaaccaggcgcgacaagaaaccattgcccagttgaagcaaacgcgtgaagaagtcgccatgcagcgtgctgaactggaagagaaacagagcgagcaacaaacgctgttatatgagcagcgcgcccaacaggcgaaactgactcaggcgctgaacgagcgtaaaaagacgctggcagggctggagtcttccatccagcaaggtcagcaacagttgagcgagctgcgcgccaacgaatcccgtctgcgtaacagcattgcccgtgcggaagccgcggcgaaagcgcgtgcagaacgagaagcacgtgaggcccaggcggttcgcgaccgccagaaagaagcgacgcgcaaaggcaccacctacaaaccgaccgaaagcgaaaaatcgctgatgtcccgtaccggtggtctgggcgcgccgcgtggtcaggcattctggccggttcgcgggccgacgctgcatcgctatggcgaacagctacagggtgaattacgctggaaaggtatggttatcggtgcttctgaaggtactgaagttaaagcgattgccgacggtcgggtgattctggctgactggctgcaaggctacggtctggtggtggtggttgagcatggtaaaggcgacatgagtctttacggctataatcagagcgcactggtgagcgttggttcgcaggttcgcgcgggccagccgattgcactggtgggcagcagtggcggtcagggtcggccttcactctatttcgaaattcgccgccagggtcaggcggtcaatccacagccgtggttgggaagataagttttgtttccatttcgtcgtaacgttcttgcatttgccgctctgttggcgctctcctcccccgtacttgctggcaaacttgccatcgtcattgatgattttgggtatcgcccgcacaacgaaaaccaggtgctggcgatgccttccgctatctccgtcgctgtattacccgattcaccgcacgccagagagatggcgaccaaagcgcataacagcgggcacgaagtgttgattcatctcccgatggcaccgttgagtaaacagccgctggagaaaaatacgctacgcccggagatgagcagcgacgaaattgagcgcattattcgtagtgcggtcaataacgtgccctatgccgtggggatcaacaaccacatgggcagcaagatgacctctaacctgtttggtatgcagaaagtgatgcaggcgctggagcgttacaatctttacttcctcgacagcgtaaccatcggtaatacccaggcgatgcgcgccgcgcaaggcactggcgtgaaggtgatcaaacggaaggtattcctcgacgattcgcaaaatgaagcggacatccgtgtgcaatttaatcgcgcaattgacctggcgcgtcgcaacggttcgaccattgccattgggcatcctcaccctgcaacggtacgcgtgttgcaacagatggtttataacctgccgccagacattacgctggtgaaagccagcagcttgctgaatgaaccgcaggttgatacttctacaccgccgaaaaacgctgtgcctgatgcaccgcgtaatccgttccgtggcgtgaagctgtgcaaaccgaagaaaccgatagaacctgtttatgctaatcgcttctttgaagtattaagcgaaagcatcagccagagcacgctgatcgtttacttccagcatcagtggcaaggctggggcaaacagcccgaagcggcgaagtttaacgctagcgcaaattaaaggcgctacgcgtaatgcgatggtgcgaccgcgttttgtcgcgccattgccataagcggaaagaccacagtaacgcctggtaaccgaccttcacgctgcgcacattggtaatcaggcgcttatacataccggaagtaaatatctcggcaatcatccgttggcgggtaagaatatccggctctttgcgcaccgcatggcaaacacgcaatgcctcgtaagttatttgctgatgaaattccggataaatcataattttgtcggcataatttcgatttaatttctccagcaggcgggtaatcttaatatagtgacgttgataattaaggtttttattcccttgtctatgcaaccgactcactgacgtattatgcagataatatttatataatgattgctcggtatatcgcgcacgcagcgcgttaaacatgaattctgttgtccagacaatatcctgatgatgtaatccggcaataaatttaatgttatttttaacaataacatcacggcgataaacccccatccagacaacgtgagtccaacggcgcgaagaaagccccatccgcagccagtccgggccggttaatacgccggttgagcgaaggcgatcggtggggatggattgccaggtttctcccgtttcacgaaaacaccagtcagcgttgcactgcgccacgtcgaggtcgtcctctaacgccatggtcatcagcgtttcgtacatggtgggatagacttcatcgtcagcatcgacaaaagcgacatatttgcccgttgccacttcaatcccacgattacgcgccaccgatgcgccagcattcgcctgatgcaacaaacgaacgtgcggatagttttctgcgtaatactttgctatttcaacagaattatccgttgaaccatcgttaataataatgatttccagagcagtccaggtttgcgtaattaaagattccatacaagtgcggaaatcatcgcccgcattatataacggaataataacactaagtttattggtgctgttcatcataaattaccgacgacctctgaagttatcctgacgttttacaggctttgtattaagaaactattaagcctgtgagatattatttttacaggtgagagagtcacttcagggtagagagataatgagagcagctatataagagatcagcacaattacgaactctttattacactgacaggattttacatatttaacagattatcctcagataaaagggctggaataccagcccttgttcgtgttaatcccagctcagaataactttcccggactggcccgaacgcatagcgtcaaagcccttctggaaatcatcgatagagaaacgatgggtaatgatcggcgaaagatcgaggccagactgaatcagcgccgccatcttgtaccaggtttcaaacatctcacgaccgtaaatacctttaatgaacaagcctttaaagatcactttggtccagtcgatagacatatcagacggcggaatacccagcatcgcaatacggccgccgtgattcatggtgtcaagcatggtacgaaacgctggcggcgcaccggacatttccagaccgacatcaaaaccttcggtcatgcctaactccgccatcacgtcattgagattttctttggcgacgttaaccgcacgggtgatacccattttacgcgccagctcaaggcggtattcgttaacatcagtgatcaccacattgcgtgcaccaacgtgtttcgccaccgccgctgccataataccaatcgggcctgcaccagaaaccagcacatcttcgcccaccagatcaaacgacagcgcggtatgcacggcgttaccgaagggatcaaaaattgcggctaagtcatcggaaatattgtcggggattttgaaggcgttgaatgccgggatcaccagatattcggcaaagcagcccgggcgattaacaccaacgcctatcgtgttgcggcacaaatgggtacgaccaccacgacagttgcggcaatgaccacaggtgatatggccttcgccagaaacgcgatcgccgatcttgaagcctttcacttcctgaccaatacctaccacttcaccgacatattcatggcccacgaccatcggcaccgggatggttttttgcgaccactcatcccagttatagatgtgaacgtcagtcccgcagatggctgttttacggattttaatcagcagatcgttatgcccgagttccggtacaggaacgtcggtcatccagatgccctcttccgctttcagtttggataacgctttcatctcacatcctcaggcgataacgcccagttgtttaccaatacgcgtaaatgcttctactgcacgcgtaatttgctcaggggtatgcgccgcagacatctgggtacgaatacgcgcctgacctttcggaacgaccggatagaagaaaccggtaacgtaaatgccctctttttgcagctcacgggcaaatttctgcgccactaccgcatcaccaagcatgaccggaataatggcgtgatcggctcccgccagggtaaagcccgccgccgacatttgctcacggaactgacgcgcgttcgcccacagacggtcacgcagttcgctgcccgcttcgaccatctccagtactttgatggacgcggcaacaatggccggtgccagcgagttggagaacaggtacggacgagaacgctggcgcagccactcaaccacttctttgcgcgccgcggtataaccaccagaagccccgcccagcgctttaccaagcgtaccggtgataatatcgacccggcccatcacatcgcagtattcatgggaaccacgaccattttcaccgacaaaaccgaccgcgtgggagtcgtctaccatcaccagggcatcatatttatctgccagatcgcaaacgcccttcaggttggcaatcacgccgtccattgagaacacaccatcggtggcgatcagcacatgacgcgcaccggcttcacgcgcttctttcagacgtgcttccagctcctgcatatcgttgttggcatagcgatagcgtttagctttgcacagacgcacaccatcaataatagacgcgtggttcagtgcgtcggagataatggcgtcttccgcacccagaagcgtttcaaacaggccaccgttagcatcaaagcaggaagagtagagaatcgcatcttccatccccaggaaggccgccagtttttgttcaagctctttatggctgtcctgagtgccgcaaataaaacgcaccgaagccatgccgaaaccgtgagaatccattcccgcctttgccgccgcaatcagatcaggatgattcgccagcccgagatagttgttggcacaaaagttaatgacgtggcttccatcagccacagtgatatctgcttgctgcgcagacgtaataatgcgctcttctttaaacaacccttccgcccgtgcggtttccagatcgttggttaactgctgataaaattctccacgcattgcgattctccagacagggcaaattccagcacatattacccaaacttataggtcgcgacgagataacgcgttaacacttctgcaaaattcaggataaataacgtgtaacttgatgtctctcaacacctacagatagtagaaaaactgtacagttttggctgggcataatgatgattgattttactgcattgatataaaaagaaaaaatgatgccaaagcatcatttttcctatctcagttggtatcaaaacgctacccactaatggagggaaacctattttcttgaaaggaaaattctcagcgcctgcatttttgcccctaaagtgttactcctgaagcagcgaaacaaatcgaaccattttcctctccccagatagtttaggttgaagagatcggggcgtttgtaatagcacatgacaaaaatgccctggtcatcgtccacaatgttattatttagtgttattttttgactttccagaactaatttatagaattctttccatttatgctgtgaaccaacaattgcgcccccaataatatatacatgattgccaatcatgaaatcaaaaacctgttgttgagatgtgacagtaagccctttttttatagtgaaaagatgcatcttactttcatcaaatgggaaatcccaaattttcaatcctcgagttacatttggcttatggcaatagccaaaatctatccacgcaacaagaggcgttttcactaagcccatgttgatagctttatttacaaaataggccttaaggttacataccaaaacatactctggtgaccagtactctgggttttttaattgtcgaggctcaagtctatttgtaaacgactcatctttttgaattttttcgatacgacttctgatatatctaaatttcttttttatatcgataacgataaccgttgttggttttccgttgcgaatcgcttcaacccttggtttcaaatcgggagaagtgaaaataatcatctcattttcaagtgcggccagacgctcaaagtaactaaaataaacatcaactgaacgagctagtttttcacggaaccctttattagcagtccaatcccctctaccaatgtcaaaatatgcagtgataattgtggtggatgatttcattactaataagaccattaatataaaaaaagaattatatcataaatattaatagaatgtatactgtatattatccattcaaatgcttccgttatttatcatacatcggaatattgatactaaagcactattcacatgcaaaaccaacatccgccatgaaggactagctaaaacccaaactagtttgttgcaattagcatccttgcacctctatgtaaagggctgaagggattcggatgtgatggtatgattacagacattcgtgtctgagattgtctctgactccataattcgaaggttacagttatgatcatcgttaccggcggcgcgggctttatcggcagcaacatcgttaaagccctgaatgataaaggcatcaccgatattctggtggtggacaacctgaaagacggcaccaagtttgtgaacctggtggatctgaatatcgcagactatatggataaggaagacttcctgatccagattatggctggcgaagagttcggcgatgtcgaagcgattttccacgaaggcgcgtgctcttccaccaccgagtgggacggcaagtatatgatggataacaactatcaatactccaaggagctgctgcactactgcctggagcgtgaaatcccgttcctgtacgcttcttccgcagccacctacggcggacgcacctccgactttattgaatcccgcgagtacgaaaaaccgttgaacgtctacggttactcaaaattcctgtttgatgaatatgttcgtcaaatcctgcctgaagcgaactcgcagattgttggcttccgttatttcaacgtttatggaccgcgtgaaggccataaaggcagcatggcgagcgtcgctttccatctcaacacccagcttaacaacggtgaatcaccgaagctgtttgaaggtagcgagaacttcaaacgcgacttcgtctatgtgggcgacgtggctgatgtgaatctgtggttcctggaaaatggcgtttccggcatcttcaatctcggtactggtcgtgcggaatccttccaggcggtagctgatgctacgctggcttatcacaagaaaggccagatcgaatacattccgttcccggataaactgaaaggccgctatcaggcgttcactcaggcagatctgacaaatctgcgcgcggcgggttacgacaaaccgttcaaaaccgttgctgaaggtgtaacggaatacatggcctggctgaatcgcgacgcataagagctctgcatgaaaatactggtgatcggcccgtcttgggttggcgacatgatgatgtcgcaaagtctctatcgcacgctccaggcgcgctatccccaggcgataatcgatgtgatggcaccggcatggtgccgtccattattatcgcggatgccggaagttaacgaagctattcctatgcctctcggtcacggagcgctggaaatcggcgaacgccgcaaactgggtcatagcctgcgtgaaaagcgctacgaccgcgcctacgtcttacccaactccttcaaatctgcattagtgcctttcttcgcgggtattcctcatcgcaccggctggcgcggcgagatgcgctacggtttactcaacgatgtacgcgtgctcgataaagaagcctggccgctaatggtggaacgctatatagcgctggcctatgacaaaggcattatgcgcacagcacaagatctgccgcagccattgttatggccgcagttgcaggtgagcgaaggtgaaaaatcatatacctgtaatcaattttcgctttcatcagaacgtccgatgattggtttttgcccgggtgcggagtttggtccggcaaaacgctggccacactaccactatgcggagctggcaaagcagctgattgatgaaggttatcaggtggttctgtttggctcggcgaaagatcatgaagcgggcaatgagattcttgccgctttgaataccgagcagcaggcatggtgtcggaacctggcgggggaaacacagcttgatcaagcggttatcctgattgcagcctgtaaagccattgtcactaacgattctggcctgatgcatgttgcggcggcgctcaatcgtccgctggttgccctgtatggtccgagtagcccggacttcacaccgccgctatcccataaagcgcgcgtgatccgtttgattaccggctatcacaaagtgcgtaaaggtgacgctgcggagggttatcaccagagcttaatcgacattactccccagcgcgtactggaagaactcaacgcgctattgttacaagaggaagcctgacggatgcgggttttgatcgttaaaacatcgtcgatgggcgatgttctccatacgttgcccgcactcactgatgcccagcaggcaatcccagggattaagtttgactgggtggtggaagaagggttcgcacagattccttcctggcacgctgccgttgagcgagttattcctgtggcaatacgtcgctggcgtaaagcctggttctcggcccccataaaagcggaacgcaaagcgtttcgtgaagcgctacaagcagagaactatgacgcagttatcgacgctcaggggctggtaaaaagcgcggcgctggtgacgcgtctggcgcatggcgtaaagcatggcatggactggcaaaccgctcgcgaacctttagccagcctgttttacaatcgtaagcatcatattgcaaaacagcagcacgccgtagaacgcacccgcgaactgtttgccaaaagtttgggctatagcaaaccgcaaacccagggcgattatgctatcgcacagcattttctgacgaacctgcctacagatgctggcgaatatgccgtatttcttcatgcgacgacccgtgatgataaacactggccggaagaacactggcgagaattgattggtttactggctgattcaggaatacggattaaacttccgtggggcgcgccgcatgaggaagaacgggcgaaacgactggcggaaggatttgcttatgttgaagtattgccgaagatgagtctggaaggcgttgcccgcgtgctggccggggctaaatttgtagtgtcggtggatacggggttaagccatttaacggcggcactggatagacccaatatcacggtttatggaccaaccgatccgggattaattggtgggtatgggaagaatcagatggtatgtagggctccaagagaaaatttaattaacctcaacagtcaagcagttttggaaaagttatcatcattataaaggtaaaacatgctaacatcctttaaacttcattcattgaaaccttacactctgaaatcatcaatgattttagagataataacttatatattatgttttttttcaatgataattgcattcgtcgataatactttcagcataaaaatatataatatcactgctatagtttgcttattgtcactaattttacgtggcagacaagaaaattataatataaaaaaccttattcttcccctttctatatttttaataggcttgcttgatttaatttggtattctgcgtttaaagtagataattcgccatttcgtgctacttaccatagttatttaaatactgccaaaatatttatatttggttcttttattgttttcttgacactaactagccagctaaaatcaaaaaaagagagtgtattatacactttgtattctctgtcatttctaattgctggatatgcaatgtatattaatagcattcatgaaaatgaccgcatttcttttggtgtaggaacggcaacaggagcagcatattcaacaatgctaatagggatagttagtggcgttgcgattctttatactaagaaaaatcatccttttttatttttattaaatagttgcgcggtactttatgttctggcgctaacacaaaccagagcaaccctactcctgttccctataatttgtgttgctgcattaatagcttattataataaatcacccaagaaattcacttcctctattgttctactaattgctatattagctagcattgttattatatttaataaaccaatacagaatcgctataatgaagcattaaatgacttaaacagttataccaatgctaatagtgttacttccctaggtgcaagactggcaatgtacgaaattggtttaaatatattcataaagtcacctttttcatttagatcagcagagtcacgcgctgaaagtatgaatttgttagttgcagaacacaataggctaagaggggcattggagttttctaacgtacatctacataatgagataattgaagcagggtcactgaaaggtctgatgggaattttttccacacttttcctctatttttcactattttatatagcatataaaaaacgagctttgggtttgttgatattaacgcttggcattgtggggattggactcagtgatgtgatcatatgggcacgcagcattccaattatcattatatccgctatagtcctcttactcgtcattaataatcgtaacaatacaattaattaagaataaacaagtttaagaagtgagttaaaactcacttcttatctatacaacttaatctctttactgaattagttaaagtttcagtatcgatatcttttaccgtatatgttggggatactatttgtatagatttatgatgattcggggaccaaattaaatgcgagggatattccggagtacgtgaattagggtaaaatgcaagcgttggtttatgataagccgcagcgatatgaacaagagctgtatcaacagaaatgacaaaatcactatacttggtcaacgcaacggtataaataaactcatcaaatggtagtgtttcgatttcaagtattggtattgtcaataaatcttgcggtaacccggtaaatataatccgataattttcaaagtgtgttttcacttcttgatatataacttttatttgctcaaacgtaagacggcatattttttttgcacctaatggattaataatgactattcttgtatctccaataaattcttttattttatcttcaacatctactggtaaatgcaagtcgtagttggtggaaaatttaccctcaccataaatatgcttcagtatttctattgctcgtgtactcatatgttcttttaaacattcatcgtggggatggtaaaatgaatagtaacgcttataccaatgatcaaaacccagaatgtaagaatcttttaaacttgataatattaagctatgcttaaatgagggcatagtttcaaaggggtctaatacaatatcgaactgtaaatcccgcagatgcttacatagagtaagcatttcaagaaaaccggttgattctttaatacagaactcaaatatatttttattattagagagaaattccccaccctttctatttgtgagaagagttattttaacccctttactataaagttcacgataaatcgaacttaatacaattagatcaccaagtttattattatcatgaataataaggcatgatttaacttgtgctggatctgtaatttgattatttattttattacgaaataaaaaagaaaggaaattaatcttgattttgtttatataaaatcttttctttttgtgaaaagttcctaagcgcatttttataccatattattttagtttcaggatgattaattagcataagaatcggttgaagttctatattgcattttttttcttgtcatatcttttgattcttctgcactgatgtcttgaagtttaataaatggaattacatcgtaagaaatagctgtatcatctgataaattataaatattaatatcttttacattatcatgcataaaacgaaaaaatggcaatattttgaataaatccctacttaattccgagggcatgggatttttattctcatcatagaaacgagaacagctacccgttaaatcaagaccagaacaaataatccgcgcatacttaagtgaatatgcgatttgaattgcagcaaaggcaatagtatggcatgagcaataaccaagactaatgtccttgcaaaatccaaccagacgaccttttttagacaacggtacagagatcagcagttctttgtgaatctgtctcaaaatattaaatttaatcttctttataaaaccacctttttcccgacggtaaaaggaccgtaatacgaggcagttctggaggatataaagtttatcttctttggaagcgtgttcataaacgtcaacgtttactatggtataacgacttctctggctaaatttataaaaatcatcacgacgctgatgtaaaaatcggacatctgtaagtacatatataaaaggaacgatattattacttaacagatattgcgcagaaccattgacagcaataatatcctttgttcgtaatactgacaaaggtgttttttgcgatgtagggcccgaaagaaaaataataacatcatcagatattttattttcaatcaggttttcaacatcttttttgtcaatgtatctaatattcttcatgataaacctgtgaaataaataactccgcttaaaactgtcctggtgaagacatgtaattgtgggattttttttagcgcgctggtttccctttcaaacgccgcataaaattgcgcatttttttacgatatactaaaagataatagcctagatctctaatctcatttttaataccgtaatgacgctctaagtcaatacgatctttcgctttacgctgcgctgaagcacgctttccggagagatcgataattcgaacctcaccattttttataatgaagttaccacgatgggggtcgccagaaaccatgccatgttgatgtaaggcattaattgattgctgaattttattttttagcgcatcatcaatatcgggcatatcacacaactctatgccatcaatatactcgatgatcatgatataagtatggacaaaacgtaaggttttccgttcagccaataaataaaagtcattgagtgtatttaacccttcatttcgtactttttgggtttgctcaaaaaggcgttcgtaataatcaccttttaacagagacttaaagaaacgttcgttacgcttaactttcggagaaaaaaccttaagaatcaatttaccgtaatcggtatcaataagcataacttttgtatcatcaatagaacgaaaaaccttgatgatatttatattataagacaagaagtcatttaatacattgaggtactttgaattgttttcatcggtaaaaacaaccaagtctttgatcttgctcttctgaatcataataaaccagttaaatgttatttacggtaatattttcggcaaagataacagactcctgctataattcctgagatataatgatgttgcactaaaagatgtttatatctttttttaaattcaataattgatttcgcatctcgtggagagtcatctttccagggggaattttctaaagctattttatagtattttaccgatggataaattgcccatttgtgccacggtttagttgcacctgtataatgaataagaagagtactttctgtaatcagctttttatagttttgatgtgttttgtcttttaattcacttttaattgtataaattgtattgtactcacgaggcaaaaataatgtcatccctttcagtaagacattcataacatcctgatcagggtatttataaacattatctttactcataagaatagacaacgctttttctgttagttttgcgtcagcccatttttttaagtctaaataaacgacaccggaattaaagtactgcccaagtaattcaggatcagacaacctggataccgccttttcttgcattggctcaacatctttaacaacagcagcaaccgctccatttaaacccagatgtaatagttggctaatatcgcctttacaaacaacatctgcatcaagataaagcaaacgatcaagcgttaaacccaataattgaaatgcaaataaacggaagtacattgctcttgaccagacctgtgtacaaggcaagcactggagcttatcagtgttaattctatataacgtgattcttaattggttttgctctgcaagctttgcaattttttgaaaaaaaccatcattataaacatcagcaataatataaaaatcaagattaatatgtcgattatttaggacaattgatgtgatggaaacacctacaccatcaagataattagcatcgacaccataggcaacatttaaacattcagaagtatttatattagctagccgaaaatcccaggctttaactttatctatctctatggcaggaaatgagtccacaatgctacccttatatcattactttatagtttcccagttttaatgctttatcttttcaataaaataaaaaagatagttgctaaatccttttagatatctatgctttttaagcatatgttttgcgctatatcttaattgattgctattgttcggtttcagcaacgccgtattcttccatggcgaagcattttttgcctccataaaggcttgtgatacaggataatcccaggcccaatcatgccagggcttggttggcccgatataatggataaaaatagtatcgttggttactgggtttataaagctttctttgagttgataatttaagctgaactgggtgttatatttaatatcagcgaaaataagtttatccgccagcaacatatttaacacatcctgatcaggatgtgttatttttttgattatttctggctcatttagcattgcaatagctcgtgcagaaacctgctgagccgcccattgggcagtattaatcaataaaaaaccggagttaaagtaacctttagcaattcccgcaacacctaacgaatgggcgcgtttttcccaccagtcagcttgcccttctgtaacaaccattgcgactttatcgtcaggaaatgagaaattaattagtggctcaatagtcccctgacaaatgatatctgcatccagataaaggactttaggcgccttattaataaagtaatctgcaataacaaaacgaaaatatattgcatgagtccaattcttagtgctaggcaatgagcgcagtcgatcaccattaatcagatatattttaattctggttttatactgcaacgccagggcatcaaaatacttacgatcatcatcaccaaaataatcagtaaaaatatggaaacacaatcgacttccttcattatattttaatattgaagcaatcgaaattccgcaaccaaatagaaagtttttgtcagttccataagcgatgtccagacaaagattttctgtttctactttatgatcataatcaataactgaattaagaaactcagtttcctggaaaaacacctgctgcattatttcctccgggaaatagcagaaataattaccttatgtaatctatcgtaatacttcgattggtaaaattcatcgatcgacgcaggaattttttcatgttcgatatgaatttcacctgctatatatttatttagaagagttacaaaaccagcaatatctcccggttgatacagatggccattgacatcaggttgaataatgtcagcaggcccggagacacaatcggcactgatacaaggaatcccccacgacaaggcttcaagtagggtcattgggaaaccttcaaaagatgacgtgagcaataacgcactcactttttcaatatcttgctggaccaattcccagggatattgttgccaaccataccagacaattcgatcatcaatatttaattctctaccataagcctggcatttttcgaaatcggagccatcacccaatacatggagtttccagttacctttcgcttgtgataagccatcaagcaggtctttaactcttttctggccttcaaatttcatacgcccaacataaataaacgttgccgtttcaccttcctcgggcgcgggaatgactgagtctttagtttcgacgggattaaaaataacatttatcgtcgattctgctacacctcgattaatcatttgctgtttaatgccagagctgattgctaaatgatagtcggcacaggtgatatattcagcatgttttttgtgatctaaagaaaaatgtggccatgaaaatactggcatatcaattcctgattttttacgtgcttttgcggcaaacaggcaggagatcacatcaatacaaataacgatatctggttggtactcctgaagccatttacttagagcatgaatatgtttcgcccgacgcaaaaaacctaaacgaatattggaaaatgaacatgagtatttaataccttccagccatcccttatccattttgtcattacgacaaaagaaaaacatttcactttggatatgttgttgcctgaaggtagtaataacatcacggatgacagtttccatgccgccaaatccagaaacagcttcgccgataaacgctattttcatagaaactctcattaattgagtaaaactcactgttttaacggttttatttgtctataaaatcagaaacaatcgttgacatcattttatctggactgaatttatataaactatcataatccattggtttaacagatgagttaataaaatactctaacttatcccaatcatcatgacctattataaaaaagcgagattcactatagatttctgaaccaaatacatttatattattagtaattaattttttattgaaaaatagtgcctcaagtatacgaagagtccagccagattggttttctttggttatatcaacaattatattagcatttaatgttcttctaatattctcttcataagatatttgtttttcaatcaaatactttgaagtcgtagatgatgtcttatctttgacaacattaaaatctagcttacatcctagtgttgttaatctctcggctaactcattaattatttgaagacgccctttatcacgaccaaggaaaaaacatattggctggctgttatttttgtcagataaactataatttctaatttcatccattcctataggaaaaaattgttctattgccttgatcttttcattccctataaatctatgctcaaaatcatatataatatcgaaataattcgcgttatcaagaataaaatcttcgccaacagtatttcttagaagcaaaactttatgacagttaatattttttaatatttgtttattgatacctttattaacaacactgtcattaatgataattatgtcatcttttttaatatcattgaggtaatgcttgatgaataatcgccccagccatgcattatccatccctatttttgatatttttttattaatccagttatatttttttggtgttgttatattttttatcttgtacttttttttcaggtactgaatcatttttaattcataatctgcaacccaatttataaaataaatagtcataataaagttagttccagtacatactaataaatatttttataatcctttgcgttgtgttcgctctttaatacgctcggccttaacgcttgccatgttcaataaattctgttcaagagacaatattttgcgtaaaggcatcccaaaataaaccttcataaatcgccagatatctctttgcgtcaggccaatattcattgatgagaaatataaaccaatcaggtctttatcgcgccagcggcgcggtacttttgcacgtatctgtgcccgatgcagatcgataactgaaatttttaattcatcttcccggccagtaaatggcaaatgaagcaaaaagtggcaaatgtaacagtcgcggtgatttatccctgcagtatgcattttacgcaccatagttgctacacgtgcgatcagcatacgcttaacacgtatatcaggcgggttgactgcccaatcggcacaataatcttcaaggctaattgtgggagtgagatcttcggtaataataaatgatgcgcgagttaatggatttaaccctttttcgccaaacccaatgcccttcattgtatcaacgccaacatcactcaggcgatgaatagcgtgccactctctgtctgcgcccaaaacgggcatccgcaatgagagtagattttttataatctcttttaatgtcgtccccttgtgccatttaagaaaatagcttttcccggacagttcaaagcgtaatgtacgacgagtctccagttcacgaaagacctcgccgttcagttttttgacctctgcaaaagcatctttaccacgccaaagtgtggcaagcggctcttttaattcaaccatctaaaccacctgtaatgatatccgcggctttttctggcaagctatacaaatcctgagtatcggcataatggcgagcattctccgcccaggccattcgcaatggcgactgagttaacgctttacgtaaaacttcatttaattgttcctgagagaaaggttcagcgatgaccgttccacaattggcatccgcaatataatgcgcgtacccacataccgctgttgttaaaacaggtaacccagcagtgatcgcttctagaagaacgatacccgcggcttcctgataagcgggatgcagtaataaatcagcggctgccattaattctgacacatcattgcgaccggagaagaaatgcacattgctccgcacgccgagtttttctgccagcgcttcaaattttcgcggcttatcctgaccaacaacaaataaaagcgtattgtgacgtaatgattccggtaacgatgccaaagcttcaattgagcgatctacacctttacggccaaaatctgatccaacctgcagtaataagttttgttgctcttttatgccatttttctggcgataaatttcacggctgtttgggatttgctcactgtattttctgtccggataaataccgggaggaagaatttgaaaacgttcaggttcagtttgataatgcttctggaaatcggcgatttgcttatcggtcagcatcataagtttcgtcgatttaccctgctcgaaagtcgctcgctcaaatgcggcataatggcgatatcgtgatgttaaacgatataaaaaacctttttcttgcgcaactttctcggcgtaacaaacatcagcggcaaaataaacatccaggccaggcatcttattaaacccaacaacgcgatctgcgggatgctctttgagatgattttgtacccaggcataatattctgcattgcgtccatggttggtatgggacttaactggcacctgaataagctcaaatgctttcgggcaatcgccttcccacgactgtgtatatacccgaacatggtggccccgtgcggcaactgttgatgcaatgcgcataaagtcacgttgaagcccaccaaatggaaaatatttatataaacaaaacgccacgatcataattgtgcattcctgtcagctgaaggggcatcttctggcaacagcttttccgtagcggcgatcacatcctccgctgggataacagaaagatattttttgttgcggtcaagttcatgccgggtcggcattttctgataattccccgcccagaattgaataatattctcggtccagggacgccagaatacgtgatccgttgcaccaaatagactaatgactggcgttttcactgccgctgcaatatgtcccggcgcagaatccacaccaataaaaagcactgcatgatcaattaatgcacccagttcaggaaaacgtgttttacctgcaaggccagtaatgggttttgtttcgcaacctcgtgcaatctcatctacacaagcgagatcatctgccgagggcccacaggttagcacaacctgatagcctcgctgttgcagcgcatcgataaccttagaaaatttatcgttatcccaacacttaaatatctgacgcgctgtcggttggatgacaacataatgatcttttacgcccagggcatctaattcccggcgcatcttcttccagcaatcttcggcgtaactcattgttgtgtcggtgtagaaatcggtaatacctaatggctcaaggaccgataaattacgctcaacaatatgtgtaccgtgtattggcgctaagtgtgtgaagctttttttccaaataccatgctgccgatgaccataaagttgcgatattttcatccgtgcaggtaaacaacgtaccagcagcgccaccatccactgatccgtaagattaatgaccaggtcataattattcgcacgcagagtttttatcaacgaaagcacatttttaattttatcgaaagttcccgcacctttattgcttatcccatagagcgcattaatttccgggttttcagacaaaatagggatggtgtcctgataaagcagcatatcgatttttgcatcaggataattctgcttgagcgtactgatgacaggagtagttaataacatatccccatgatatcgcatctttatgaccaggatttttcgaaatggcttttccactagcgactcttttgtgtgattgtctggttaagttaagcagaaaaaagcacgctaccgccccaggctcaacagctacctgaatactgataacgcacttactttgacgtgctagtgtatcatttctttcgcagcaatccgacccgaatgatttttatacacaaaatatactttaatcataaaaatcaaatagataaaaaatagcatttcgataatgtcagtacggcctatgtagatttgaaaatggggccgagtttcaatgaatcgcataaaaatacaaaaaaaatgaagatgtagcggcagatcagaccaaactgaagctatttaagtcaaaaacgggaaaagtaatggtaaagccacagctaaatacatagaatccccagcacatccataagtcagctatttactatgctcgaattgctttacaccgcccttctctaccttattcagccgctgatctggatacggctctgggtgcgcggacgtaaggctccggcctatcgaaaacgctggggtgaacgttacggtttttaccgccatccgctaaaaccaggcggcattatgctgcactccgtctccgtcggtgaaactctggcggcaatcccgttggtgcgcgcgctgcgtcatcgttatcctgatttaccgattaccgtaacaaccatgacgccaaccggttcggagcgcgtacaatcggctttcgggaaggatgttcagcacgtttatctgccgtatgatctgcccgatgcactcaaccgtttcctgaataaagtcgaccctaaactggtgttgattatggaaaccgaactatggcctaacctgattgcggcgctacataaacgtaaaattccgctggtgatcgctaacgcgcgactctctgcccgctcggccgcaggttatgccaaactgggtaaattcgtccgtcgcttgctgcgtcgtattacgctgattgctgcgcaaaatgaagaagatggtgcacgttttgtggcgctgggcgcaaaaaataatcaggtgaccgttaccggtagcctgaaattcgatatttctgtaacgccgcagttggctgctaaagccgtgacgctgcgccgccagtgggcaccacaccgcccggtatggattgccaccagcactcacgaaggcgaagagagtgtggtgatcgccgcacatcaggcattgttacagcaattcccgaatttattgctcatcctggtaccccgtcatccggaacgcttcccggatgcgattaaccttgtccgccaggctggactaagctatatcacacgctcttcaggggaagtcccctccaccagcacgcaggttgtggttggcgatacgatgggcgagttgatgttactgtatggcattgccgatctcgcctttgttggcggttcactggttgaacgtggtgggcataatccgctggaagctgccgcacacgctattccggtattgatggggccgcatacttttaactttaaagacatttgcgcgcggctggagcaggcaagcgggctgattaccgttaccgatgccactacgcttgcaaaagaggtttcctctttactcaccgacgccgattaccgtagtttctatggccgtcatgccgttgaagtactgtatcaaaaccagggcgcgctacagcgtctgcttcaactgctggaaccttacctgccaccgaaaacgcattgaggttgttatgcaaaaacgggcgatttatccgggtactttcgatcccattaccaatggtcatatcgatatcgtgacgcgcgccacgcagatgttcgatcacgttattctggcgattgccgccagccccagtaaaaaaccgatgtttaccctggaagagcgtgtggcactggcacagcaggcaaccgcgcatctggggaacgtggaagtggtcgggtttagtgatttaatggcgaacttcgcccgtaatcaacacgctacggtgctgattcgtggcctgcgtgcggtggcagattttgaatatgaaatgcagctggcgcatatgaatcgccacttaatgccggaactggaaagtgtgtttctgatgccgtcgaaagagtggtcgtttatctcttcatcgttggtgaaagaggtggcgcgccatcagggcgatgtcacccatttcctgccggagaatgtccatcaggcgctgatggcgaagttagcgtagcgtttatgccggatggtatgccatccggcgcgcatgaattacttctggcactgccgacaataaaacgttgcccgctgcgcatgtttagtcgccacaatcggcgtaccgcacacccgacacggctcaccttttcgcccgtaaacctgcaattcctgagcgaaatagcccggtttaccatcactttgcagaaaatctttcagcgttgtaccaccctgctcaatcgaacgcagcaacaccgctttaatcacccgagctaacaattcacactctgccagcgacagtgatgacgccagccgatccggatggatccccgccgcaaacagtgattcgctggcatagatattccctacccctaccaccagcttgttatccatcagccacggtttaatcgccgtttttttcttcgcgcacttctgatgcagatactcaccattgaaatcgtcgctaagcggctccggtccaagatgggtcagcacattatgcccttccagctctttggtccacagccaggcaccaaagcggcgcggatcggtgtagcgcagcactttgccgttgctcatcaccaaatccacatggtcatgcttttcagggggaagttcttctggaaggatgcgcaggctgccagacatccctaaatgaatgataatccagccctcaggcagctccagcagcagatatttagcccgccgctgcacgctaagcactggttggtcgcttaaacggtagatctcttctgaaaccggccagcgcaagcgtccgttgcgcaccactgcatgaagaatggttgcaccaacgagatgcggttctatgccgcggcggctggtttcaacttcgggtaattcaggcatagcatctccaggaatgaacagatgcagtcaatatgggggcaagcagataacaaaaaaccccgccggagcgaggttttttgttacatcaaagcgagaattatttgattttcgcttctttgtagatcacgtgctggcgaacaactggatcgaattttttcagttccagtttttccggcttagtacgtttgttcttcgtagtggtatagaagtgaccagtaccagcagaagaaaccagcttgattttctcacgaatacctttagccatgatttatttcctctaagtacttagtacttttcgccacgggcacgcagttcagccagaactgtatcgatgccttttttatcgattacacgcatacctttagcagatacgcgcagggtgacaaaacgcttctcgctctcaacccagaaacggtgagagtgcaggttcggcaggaaacggcgtttagtcgcgttcagtgcgtgggaacggttgttaccggtcaccggacgcttgccagtaacttggcagactcgggacatgtctattctccaaaaatcaaattagctcgagcttcgtatggggtattggcgcctcgtcaggctttacagcccggtcatcgcagttctatgtgaactctcgattgccaggcccaaatgccaaacccgagattctcaaaggtggcgtagtatacgctgactcagcgatgtgctcaagtcccgaacagacaaagatcccgaaggatcgcgcatagcgggttaaatccagccgcgttcggcaaaagaaacatactctccacgcccaatcacgatatggtcgagcacgcgtaaatccatgaactgacaactctttattatccgttcagtaatgagtttatccgctttactgggttcagcacaacccgaagggtgattatgtgcaaggatcagcgccgaggcgtttatttttatcgcttcgcggataatttcccgaggatggacttcaacatggtttagcgtgccggaaaaaagacgcctatgcgttataacccggtgttgggagtcgagaaagatcaccataaagatctcccgctcctcacccgtgagctggctttgtaaaaattccctcgtcatctccgggctgagtaaagggctttcttcacgcatccgcacgttgtagtaacgccgcgccagttcagcaatcccctttaactgggcaaatttcgccacgccaattccatgaacgccactaaattgttcatattcagaggttaacaagccataaagagagccgaaattctccagcatctcttttgccagggttaatacatctttaccgcgcgttccggtacgcagaaatagcgccagcagctcgacatccgttaaggcgctaataccaaacttcagcattttttcgcgcggcatcaacagctgtgaattgtttttcaccttcacctcctttgtggtgctcgcatcctgtcatagccgtttcgttaaatcgacggccagttttcaatcctggaaagcgcctcgcaaagtgaatctcaggtgaaggcacgacaacaaaagtattgtgataaaatcgccaacttctggtgtcaccctacaggaaaaatcatcatgagcctggccggtaaaaaaatcgttctcggcgttagcggcggtattgctgcctataaaacccctgaactggtgcgtcgtttgcgcgatcgcggggccgacgtccgcgtagccatgaccgaagcggcaaaagcctttatcaccccacttagcttgcaggcggtttctggttatcccgtttccgacagtctgctggacccggcagccgaagccgctatgggccatattgagctgggtaaatgggctgatttagtgattctcgcccctgccacggcagatttgattgcccgtgttgctgccggaatggcgaatgacctggtatcgacgatttgtctggctacacctgcgcctgtagccgtgctccccgccatgaaccagcagatgtaccgtgccgctgccacgcagcataatttagaggtgcttgcttcccgtggtttgctcatctgggggccagacagtggcagtcaggcttgtggtgatatcggtcctgggcgaatgctcgatccgttaaccattgtggatatggcggtagcgcatttttcgcccgtcaacgacctgaaacatctgaacattatgattaccgccggcccgacgcgtgaaccgctcgatccggtgcgttatatctctaatcacagctccggcaagatgggttttgctatcgccgccgccgctgcccgtcgtggcgcgaacgtcacgctggtatcaggtccggtttcactaccgacgccaccgtttgttaaacgtgttgatgtgatgaccgcgctggaaatggaagccgccgtgaatgcttctgtacagcagcaaaatatttttatcggctgcgccgccgtggcggattatcgcgcagctaccgtggccccagagaaaatcaaaaagcaggccacgcagggtgatgaattaacaataaaaatggttaaaaaccccgatatcgtcgcaggcgttgccgcactaaaagaccatcgaccctacgtcgttggatttgccgccgaaacaaataatgtggaagaatacgcccggcaaaaacgtatccgtaaaaaccttgatctgatctgcgcgaacgatgtttcccagccaactcaaggatttaacagcgacaacaacgcattacaccttttctggcaggacggagataaagtcttaccgcttgagcgcaaagagctccttggccaattattactcgacgagatcgtgacccgttatgatgaaaaaaatcgacgttaagattctggacccgcgcgttgggaaggaatttccgctcccgacttatgccacctctggctctgccggacttgacctgcgtgcctgtctcaacgacgccgtagaactggctccgggtgacactacgctggttccgaccgggctggcgattcatattgccgatccttcactggcggcaatgatgctgccgcgctccggattgggacataagcacggtatcgtgcttggtaacctggtaggattgatcgattctgactatcagggccagttgatgatttccgtgtggaaccgtggtcaggacagcttcaccattcaacctggcgaacgcatcgcccagatgatttttgttccggtagtacaggctgaatttaatctggtggaagatttcgacgccaccgaccgcggtgaaggcggctttggtcactctggtcgtcagtaacacatacgcatccgaataacgtcataacatagccgcaaacatttcgtttgcggtcatagcgtgggtgccgcctggcaagtgcttattttcaggggtattttgtaacatggcagaaaaacaaactgcgaaaaggaaccgtcgcgaggaaatacttcagtctctggcgctgatgctggaatccagcgatggaagccaacgtatcacgacggcaaaactggccgcctctgtcggcgtttccgaagcggcactgtatcgccacttccccagtaagacccgcatgttcgatagcctgattgagtttatcgaagatagcctgattactcgcatcaacctgattctgaaagatgagaaagacaccacagcgcgcctgcgtctgattgtgttgctgcttctcggttttggtgagcgtaatcctggcctgacccgcatcctcactggtcatgcgctaatgtttgaacaggatcgcctgcaagggcgcatcaaccagctgttcgagcgtattgaagcgcagctgcgccaggtattgcgtgaaaagagaatgcgtgagggtgaaggttacaccaccgatgaaaccctgctggcaagccagatcctggccttctgtgaaggtatgctgtcacgttttgtccgcagcgaatttaaataccgcccgacggatgattttgacgcccgctggccgctaattgcggcacagttgcagtaatatgacgccggatgacttttcatccggcgagtttctttaaacgccaaactcttcgcgataggccttaaccgccgccagatgttccgccatttccggcttctcttccaggtaagcaatcaggtctttcagggtgatgatagagatcactttgcagttgtaatcacgctcaacttcctgaatcgccgaaatctcgccgcgcccgcgttcctgacgatcgagcgaaatcaacacgccagcaagcgtcgcgccattggcctgaataatctccatcgactcgcgaatcgccgttccggcggtgatcacatcatctaccagcattacgcgtccttgtaacgcgctaccaaccagattgccgccttcaccgtggtcttttgcttctttgcggttaaagcagtacggcaggtccaggtcgtgatgctccgccagtgccacagcggttgtggtggcaatcgggatccctttgtaagcagggccaaacagcagatcgaactcaatgccggaatccaccaacgcttcagcgtaaaaacggcctaacagtgccagatcgcgcccggtattaaacagcccggcgttgaagaaataggggcttttgcgcccggatttcagcgtaaactcgccaaactttaacacctgcttgctaagcgcaaattcaataaactggcgctgatatggtttcatgccttcgctcctcatcttacttttctacagacaaaaaaaaggcgactcatcagtcgccttaaaaatcagtttgccagcgccgccttctgcgtcgctacaatggattcgattcccctcgggccagagccaacaagatgagtagctcttcatgggtgaacggctcgccttctgccgtcccctgcacttcaatgatgcgcccgtcttcggtcatcactacgttcatgtcggtctctgcggcagagtcttcaacgtattccagatcgcaaaccgcttcgccgttcacaattccgacagaaactgcggctaccatccctttcatcggattggttttcagcttgccgttttccaccagcttctgtagcgcatctaccagcgccacgcaggcacccgtaatcgacgcggtacgcgtgccaccatcagcctgaagcacgtcgcagtccagcgtaatggtgaactcacccagcgctttcaaatctactgccgcgcgaagagcacgggcgatcagacgctggatttccattgtgcgtccaccctgcttacctttcgccgcttcacgagcgttacgggtgtgggtagaacgtggcagcatgccgtactctgcggtgatccagccctggccctgacctttcaggaagcgcggcacgccttcttcaatagaggcggtacacaacactttggtatcgccaaattcgaccagcaccgagccttctgcatgttttgtatagttacgagtcagggtaacgggacgcacctgattattgctacggcctgctggacgcatattgaaatctccggcttgaaacaaatgtggctgcgcattatacggacttccggcggttattcctatcctgacaaggcatcgatggctataatccttccacctctccttttataaacaggaacgtctatgatccgcagtatgaccgcctacgcccggcgtgaaatcaagggtgaatgggggagcgcaacctgggaaatgcgctcggtaaaccagcgttatctggaaacttactttcgtctgccggagcagttccgtagccttgaacctgtcgttcgcgagcgtattcgttctcgcctgacgcgcggtaaagtggaatgtaccctgcgctatgagccagatgttagcgcgcaaggtgagctgatcctcaacgaaaaactggctaaacagctggtaactgccgcgaactgggtaaaaatgcagagtgacgaaggggaaatcaacccggttgatattctacgctggccgggcgtgatggcagcccaggagcaggatcttgacgccattgccgctgaaattctcgcggcgctggatggtacgctggacgactttattgtcgcgcgcgaaaccgaaggtcaggcactgaaagcattgatcgagcagcgtctggaaggcgtcaccgccgaagtggtcaaagtccgctcccatatgccggaaatcctgcaatggcagcgtgagcgtctggtcgcgaagctggaagatgctcaggtgcaactggaaaacaaccgtctggagcaggaactggttctgctggcacaacgaattgacgttgccgaagaactggatcgcctcgaagcgcatgtcaaagagacctacaacattctgaagaaaaaagaagcggttggtcgtcgtctggattttatgatgcaggagttcaaccgcgagtcgaacactcttgcgtcgaagtctatcaatgccgaagtgacaaactccgccatcgagctgaaagtgttgattgagcagatgcgcgagcagattcagaacatcgaataactcgtaacgccaattcttacttttccgccttcacaaatgccgccactcaaacagagcggcatttttcttccccgcaacattcaattctgttttgcgtgcctgctccagattttgcgatgtttttttgcccagcacactgagaacgtgagatactcacaactgtatataaatacagttacagatttactttctttgcaattgatatcacatggagtgggcaatgaacgaacatcatcaaccttttgaagagataaaactgattaatgcaaacggagcagaacaatggtcagcaagacaacttgggaaactactgggttattcagagtatcgtcactttatacctgtattaacgcgcgccaaagaagcctgtgagaacagtggtcacacaattgatgaccatttcgaggagatcctcgatatggtcaaaattggctcaaatgccaaaagagcattaaaagacatcgtactctcccgctatgcctgttacctggtagtacaaaacggcgaccctgcgaaaccggtcattgcggcagggcagacttattttgctatccagacccgacggcaggagcttgctgacgatgaagcatttaagcaacttcgtgaagacgaaaagcgtctgtttctgagaaatgagttgaaagaacataacaaacaattggttgaggcagcacagcaagctggggtagcgacagctactgatttcgccatatttcagaatcatggttaccaggggctgtatggtggattagatcagaaagctattcatcagcggaaggggctgaaaaagaatcagaagatcctggatcatatgggttcaacagaactggcggctaatctctttcgagctacccaaacagaagaaaaactcaagcgggatggcgtgaattcaaaacagcaagcaaacaccacacactttgacgtgggtcgcaaggtgaggcaaaccattcaggaacttggcggaaccatgcctgaggagttgccgaccccgcaggtcagcatcaagcagttggaaaacagtgtaaaaattacagagaagaaatagcagaaactaaaaactctttttgttgattgagacacccgatgcgtaagccaaggtccaggtgcagtgaacacaatggctaaatattgcacctttcttttccccctcagttttaacctattttttcttatgcattttctcagacaagaagtcagaagaatgcatctctgctacagaaaatagcgatttcacataactacaagttatcaatttcccctccccttaaaaaatctcaatcgtgacaatgcgcacaaatcgctaccctgccagacagatttttagggagagaaccatgctgttacacattttgtatttggttggcattactgccgaagccatgacgggggcgctggcggccggacgacggcgcatggatacatttggcgtaattattattgcgaccgccaccgcaattggcggagggtcagtgcgcgatattctgctgggccactatccgctcggctgggtcaaacacccggaatatgtgattatcgtcgctaccgccgcagtactcaccactatcgttgctcctgtaatgccttacctgcgcaaagtgtttctggtgctcgatgcgctcggactggtggtcttttctatcatcggggcacaggttgcactggatatggggcacggcccaattattgccgttgtcgcggcggtaaccaccggcgtgtttggcggcgttttgcgcgatatgttctgtaaacgtatcccactggtattccagaaagagttgtatgccggtgtctcatttgcctccgccgtgctgtacatcgcgctgcaacactatgtttctaaccatgatgtggtaattatctccaccctggtattcggcttttttgcccgcttactggcgctacgccttaagctgggattaccggtcttttactacagccacgaaggacactaaggttcaaaacctgtgatctgctgggcagccagccaactgcccagcttcttgatttgcgcattttccttccattcaataacctgtctggcgcgtcccgatccagtccccggcagctgctgccagaactgctccgtgctaaataaaagttgcgaccaggaccgttcatcactggcattaagcgccgcccgggttagcggtattcccattgccatcacccagcgagtaaaaggctgcttacgagccagattaaactgatgccatagctgcgcacttttacttttcgcgatccccggcgtgttctgtaattgctctggcgttaataaaagccaggaaaagatatgttcaaagcgatgagtctgatgcagcgcgcgccaaccggcctcaccaatgccatccagcccaagaacctgttttgcccccagccagactaagcgtgaaatgaactgttcctgacaaacatcagaagcaaagtagcaggtcaacgagttaaagcggttttctggcggtgtcggttttgtacgttctgcaccgcgccacaccacatcatcaatgcgaggaataccctgaccggcaaggctgacgagaatctgatcaccaggcgcaatatcccactcctgccagcgcctgacggaaccaatattcacccgctggacttttttatcatccagcatgacaggtgcgagtgacgcaaccaccgatattttaccgctcttacccaccgcaaactgaattgccttcacttcggcaacctgagctacaggttgatatttccaggccaccagccactctgcctggcccggtagccaatggcgggattctggctctttcgccgctcgtacaactacgccatcggtgacgaagggtaattccgctttccaccactcattgcgtacgcgcgcaacttcatcagcatttttcaccgcacgggtatacgtctgcgttagagtaaaacctgcggtagccagctcttttaaacgatcagacattaactgcggtccatccggccatgcccagacaaaaacgcccagagaattcagcgtgtcgctatcgtcctggcgcatcatcaagccagcaacttttgcgcgggcatttattccccccatttgttgttggatatgcccctcgcgctggagaaatatttccccctgaagcgtactgttggctaaaggcccgctaacggtttgcggcacagcggaaattaagctaactttctgcgtccagtcctcgcctttcaggccattaccgcgactgattgctttgttcagtttcccgtcccgataaaccagggttaccgcaacgccatcaacttttggctgcacccaaagatcgctacgttctcgcatccacagacttaatgcgtttttatccaccattttgcgtacacccgtatgggcaaccggatgcataaccgcaccatttaaaggcggcatcatcacgtcgcggggctcgctcccaaagcagcgttgccactgcgtaagacgggcgcttaactgatcgtaaacaccgtcttccacctcactttttccttccttccagtagtcatcgtcccactgttttatttgctgttgcaggcgggaaatttcttcctgtgctctggctggcgaccaggccggacagaccgcccacacagatgattgccagcacaagatacctattaatatcgccatccatactttcatcatcacctccgctgtagatagtcaggcagatatacaacgtgatgaaagcaaagccgagtggcaaaaacggagtctgcgaggacgcttcctgaaaatcgtctttattgcagtgaatgacaggcaaatgcggaagcagctacgcaaaacgcaacaactttgcgcaaaaagtgtgagcaagggctacgtcacatggccgcgccgtgtataataagctcgtatgtaggctttatttcgctaatcacatacgaaagatactcatggctcaaggcacgctttatattgtttctgcccccagtggcgcgggtaaatccagcctgattcaggctttattaaaaacccaaccgttgtatgacacccaggtttctgtttcacacaccacacgccaaccgcgtcctggtgaagtccacggtgaacattatttctttgttaatcatgatgaatttaaagaaatgattagcagagatgcgttcctcgaacacgcagaagtttttggtaattactatggcacttcgcgtgaggccattgagcaagtactggcgaccggtgtcgatgtttttctcgatatcgactggcagggcgcgcagcaaattcgccagaagatgccgcacgcgcggagtatctttattttaccgccgtccaaaattgaactggaccgccgtctacgcggtcgcggtcaggacagcgaagaggtcattgcaaagcgtatggcgcaagctgttgcagaaatgagccattacgccgaatatgattatctgattgtgaatgatgacttcgataccgcgttgaccgatttgaagaccattattcgcgccgaacgtctgcgcatgagccgccaaaagcagcgtcatgacgctttaatcagcaaattgttggcagactgaacctgatttcagtatcatgcccagtcatttcttcacctgtggagctttttaagtatggcacgcgtaactgttcaggacgctgtagagaaaattggtaaccgttttgacctggtactggtcgccgcgcgtcgcgctcgtcagatgcaggtaggcggaaaggatccgctggtaccggaagaaaacgataaaaccactgtaatcgcgctgcgcgaaatcgaagaaggtctgatcaacaaccagatcctcgacgttcgcgaacgccaggaacagcaagagcaggaagccgctgaattacaagccgttaccgctattgctgaaggtcgtcgttaatcacaaagcgggtcgcccttgtatctgtttgaaagcctgaatcaactgattcaaacctacctgccggaagaccaaatcaagcgtctgcggcaggcgtatctcgttgcacgtgatgctcacgaggggcaaacacgttcaagcggtgaaccctatatcacgcacccggtagcggttgcctgcattctggccgagatgaaactcgactatgaaacgctgatggcggcgctgctgcatgacgtgattgaagatactcccgccacctaccaggatatggaacagctttttggtaaaagcgtcgccgagctggtagagggggtgtcgaaacttgataaactcaagttccgcgataagaaagaggcgcaggccgaaaactttcgcaagatgattatggcgatggtgcaggatatccgcgtcatcctcatcaaacttgccgaccgtacccacaacatgcgcacgctgggctcacttcgcccggacaaacgtcgccgcatcgcccgtgaaactctcgaaatttatagcccgctggcgcaccgtttaggtatccaccacattaaaaccgaactcgaagagctgggttttgaggcgctgtatcccaaccgttatcgcgtaatcaaagaagtggtgaaagccgcgcgcggcaaccgtaaagagatgatccagaagattctttctgaaatcgaagggcgtttgcaggaagcgggaataccgtgccgcgtcagtggtcgcgagaagcatctttattcgatttactgcaaaatggtgctcaaagagcagcgttttcactcgatcatggacatctacgctttccgcgtgatcgtcaatgattctgacacctgttatcgcgtgctgggccagatgcacagcctgtacaagccgcgtccgggccgcgtgaaagactatatcgccattccaaaagcgaacggctatcagtctttgcacacctcgatgatcggcccgcacggtgtgccggttgaggtccagatccgtaccgaagatatggaccagatggcggagatgggtgttgccgcgcactgggcttataaagagcacggcgaaaccagtactaccgcacaaatccgcgcccagcgctggatgcaaagcctgctggagctgcaacagagcgccggtagttcgtttgaatttatcgagagcgttaaatccgatctcttcccggatgagatttacgttttcacaccggaagggcgcattgtcgagctgcctgccggtgcaacgcccgtcgacttcgcttatgcagtgcataccgatatcggtcatgcctgcgtgggcgcacgcgttgaccgccagccttacccgctgtcgcagccgcttaccagcggtcaaaccgttgaaatcattaccgctccgggcgctcgcccgaatgccgcttggctgaactttgtcgttagctcgaaagcgcgcgccaaaattcgtcagttgctgaaaaacctcaagcgtgatgattctgtaagcctgggccgtcgtctgctcaaccatgctttgggtggtagccgtaagctgaatgaaatcccgcaggaaaatattcagcgcgagctggatcgcatgaagctggcaacgcttgacgatctgctggcagaaatcggacttggtaacgcaatgagcgtggtggtcgcgaaaaatctgcaacatggggacgcctccattccaccggcaacccaaagccacggacatctgcccattaaaggtgccgatggcgtgctgatcacctttgcgaaatgctgccgccctattcctggcgacccgattatcgcccacgtcagccccggtaaaggtctggtgatccaccatgaatcctgccgtaatatccgtggctaccagaaagagccagagaagtttatggctgtggaatgggataaagagacggcgcaggagttcatcaccgaaatcaaggtggagatgttcaatcatcagggtgcgctggcaaacctgacggcggcaattaacaccacgacttcgaatattcaaagtttgaatacggaagagaaagatggtcgcgtctacagcgcctttattcgtctgaccgctcgtgaccgtgtgcatctggcgaatatcatgcgcaaaatccgcgtgatgccagacgtgattaaagtcacccgaaaccgaaattaatgttttatgaacccaacacgttatgcacgcatctgcgaaatgctcgccaggcggcagcctgatctgaccgtctgcatggagcaggtccacaaacctcataacgtttctgcgattattcgtaccgcagatgccgttggcgtacatgaagttcacgccgtctggcctggtagccgcatgcgcaccatggcttcggcagcggcgggtagtaacagctgggtacaggtgaaaacacaccgcaccattggcgatgccgtcgctcatctcaaaggccagggcatgcagattctggcaacccatctttctgataacgctgtcgatttccgcgaaattgattacactcgcccgacctgcattttgatgggacaggagaaaacgggcatcacgcaggaagcattggccctggcggatcaggacatcatcattccgatgatcggcatggtgcagtcgctgaatgtttccgttgcctcagccctcattctttacgaagcccagcgtcagcggcaaaatgcaggcatgtacctgcgtgaaaacagcatgttgccggaagcagagcaacaacgcctgttgtttgaaggcggctatccggtgctggcgaaagtcgcaaaacgcaaaggcctgccttatccccacgtcaatcagcaaggcgagatcgaagctgatgccgactggtgggctactatgcaggctgcagggtaagtgccatgaaaggtcgcctgttagatgctgtcccactcagttccctaacgggcgttggcgcagcacttagtaacaaactggcgaaaatcaacctgcataccgtgcaggatctactcttacaccttcccctgcgctacgaagatcgcacccatctctaccccatcggagaactactgccgggcgtttatgccacggtggaaggcgaagtgctgaactgcaatatctccttcggcggtcggcggatgatgacctgccagatcagcgacggttccggcatcctcaccatgcgctttttcaatttcagcgcggcaatgaaaaatagcctggcggcgggccgccgtgtactggcttatggcgaagcaaagcgcggtaaatatggtgcggagatgatccacccggaataccgcgtgcagggcgatctcagcacgccagaattacaggaaacgctcacgccggtttatccaacaacggaaggcgtaaagcaggccacgctgcgtaaattaaccgaccaggcgctggatctgctcgacacctgcgccattgaagaactcctgccgccggaactgtcacaaggaatgatgacgctaccggaagcgttgcgcactttgcaccgcccgccaccgacgctacagcttagcgatctggaaaccgggcagcatccggcgcaacgtcgtctgattctggaagaactgctggcgcacaacctcagcatgttagccttacgtgccggagcacagcgttttcatgcccagccgctgagcgccaatgacacgctgaaaaataaactcctcgccgccttaccgttcaagccaacgggcgcacaggcacgcgtagtggcggagatcgagcgcgatatggcgctggatgtgccgatgatgcgtctggtgcagggcgatgtaggttccggtaaaacgctggtcgccgccctcgccgcgttgcgtgcgattgcccacggcaaacaggtagcattgatggcaccaaccgaattactcgccgagcagcacgccaataacttccgcaactggtttgcaccgctcggtatcgaagtgggctggctcgccggtaagcagaaaggtaaagcacggctggcacagcaggaagccatcgccagcggtcaggtgcagatgattgtcggtacacacgccatcttccaggaacaggtgcagtttaacggcctggcgctggtgattatcgacgaacagcatcgttttggcgtgcatcagcgtctggcattgtgggagaaaggccagcagcagggcttccatccgcatcagttgatcatgaccgccacgccgatcccccgcacgctggcaatgactgcgtatgccgatctcgatacctcggtgatagatgagctgccgccaggccgcacgccagtgactacggtcgctattcctgatacccgccgtaccgacatcattgaccgcgtgcaccacgcctgcataactgaaggtcgtcaggcatactgggtttgtacgttgattgaagagtcggaattgctggaagcgcaggcggcggaagctacctgggaagagttgaaactggcgctaccagagttgaacgttggcctggtacacgggcggatgaaacctgccgagaaacaggcggtgatggcgtcgtttaaacaaggtgagctacacctgctggttgccacaaccgttattgaagtcggcgttgatgtgcctaacgccagtctgatgattatcgaaaacccggagcgtctgggtctggcgcagttacaccagctgcgcgggcgcgtaggtcgtggcgcggtggcttctcactgcgtgctgctctacaaaacgccgctttctaaaacggcgcaaattcgcctgcaagtgctgcgcgacagtaacgacggttttgtgattgcgcaaaaagatctggagattcgcggccctggcgaattgttaggcacgcgtcagacgggtaatgctgaatttaaagtggcggatttactgcgcgatcaggcgatgatcccggaagttcagcgcctggcacgccatattcacgaacgttacccacaacaggcaaaagccctgatagaacgctggatgccggagacggaacgttactcgaatgcgtaaaaggcggcagtgagaagaccgccatttcaggttaccctaccttcctgccggatgcgattcatcaccctacaaattcaataaattatgaatcaatacgcaggcttgataagcgaagcgtatcaggcatttgtctttgttgcggcggcacttctaccgccgcttcatcggttaaccggcaaaaatcggcaacatcaaatacaacttaattaccagcgcattgacgatatcgataaagaacgcaccgaccatcggcaccaccaaaaacgccatgtgcgacgggccaaagcgttcagtgatcgcctgcatgttggcgattgccgttggcgttgcaccgaggccaaaaccacagtgacccgcagccagcactgccgcatcgtagtttttgcccatcatgcgccaggtaacgaagatggcatacaacgccatgaagatggtctgtaccaccagaatcgccagcatcggcagcgccagcgaagccagctcccacagtttcagccccatcaacgccatcgccaggaacaacgacaagcttacgttacccagcacggataccgcacgctcaaagacgcggtaaaagcccattattgacagaccgttgctcagaatcacgccaacaaacagtacacagacgaaggtcggcagttcaaaagcagtgccagccaaaagttgcgcaacaattttccccaccgtcaggcagatagcaatcagcgcgatagtttcaatcagcaccaacgaggtgatcatgcgtcccacatccggcttttcaaacgccgtcgggacttcctggtcatccggaataccgttcggcgtggtggagtgtttcaccagatagcgcgccaccggaccgccaatcaagccgcccagcaccagaccgaacgttgcacaggccatcgccacttccgtcgcattggtgaagccataacgttcaatgaacaatttactccacgcagcgcccgtaccgtgaccgccggaaagagtaatagaaccggccaacagccccatcagcggatcaagccctaacaagctagccataccaatgccaatggcattttgcatcaccaacagaccaacaaccacaatcaagaagatgccaaccacacgcccaccggcacgcaaactggcaatgttggcgttcaggccaatggtggcgaagaaagccagcattaacggatcgcgcagggacatatcaaagttgacttcccagcccatgctttttttcagtactagtagcgccagcgccaccaacaaaccacccgcaacaggttccggtatggtgtatttcttcaaaaaggagacggaatggaccaacttacgcccgagcagcaacgtcagcgttgcggcaacaagcgttgctaaagtatcgagatgaaacatagttactcctttgtatccgcatcactctttcatactcgtcatacttcatcgcgcagtggcaacttcatgaactatgacgggtatcgagttatgctttcctgggtcaaattctcagctgttaatgaacaaatggcatggattttaagcagaaaaataccaaaagttatataaaaaagtgcatttatctcatttaaatatttagatgaggatgtggcaaacgtttgcttttctctttcggtcagctaaaatgcccgctttgctaccacgggattgttttcgatgtctgtttccaccctcgagtcagaaaatgcgcaaccggttgcgcagactcaaaacagcgaactgatttaccgtcttgaagatcgtccgccgcttcctcaaaccctgtttgccgcctgtcagcatctgctggcgatgttcgttgcggtgatcacgccagcgctattaatctgccaggcgctgggtttaccggcacaagacacgcaacacattattagtatgtcgctgtttgcctccggtgtggcatcgattattcaaattaaggcctggggtccggttggctccgggctgttgtctattcagggcaccagcttcaactttgttgccccgctgattatgggcggtaccgcgctgaaaaccggtggtgctgatgttcctaccatgatggcggctttgttcggcacgttgatgctggcaagttgcaccgagatggtgatctcccgcgttctgcatctggcgcgccgcattattacgccgctggtttctggcgttgtggtgatgattatcggcctgtcgctaattcaggttgggttaacgtccattggcggcggttacgcagccatgagcgataacaccttcggcgcaccgaaaaatctgctgctggcaggcgtggtcttagccttaattatcctgcttaaccgtcaacgtaacccttacttacgcgtggcctcactggtaattgcgatggcggccggatatgcgctggcgtggtttatgggcatgttgccagaaagcaacgaacctatgacgcaagaactgattatggtgccaacgccgctctattacggtcttggcattgaatggagtctgctgctgccgctgatgctggtctttatgatcacttcgctggaaaccattggcgatatcacggcgacctctgacgtttccgaacagccagtgtccggtccgctgtacatgaaacgcctgaaaggcggcgtgctggcaaacggcctgaactcgtttgtttcggcggtgtttaacaccttcccgaactcctgcttcgggcaaaacaacggagtgatccagttgactggtgttgccagccgctatgtcggttttgtcgtcgcgctgatgttgatcgtgctgggtctgttcccggcagtgagcggttttgtacaacacattccagaaccggttctgggcggcgcaacgcttgtaatgtttggcaccatcgccgcctccggtgtgcgtatcgtttctcgtgagccgctgaaccgtcgggcgattctgattatcgcgctgtcgctggcggttggtctgggcgtgtctcagcagccgctgattttgcagtttgcccctgaatggctgaaaaacctgctctcctccgggatcgccgcgggcggtattactgccatcgtgctgaatctgattttcccaccagaaaaacagtaattcactggcggcggtaagataattaccgccgcagtctcacctctttaaccattcccgccttgaggattgcgcgtaaatcgtgcataactcccttatgtgcatttcacgggatggaagaccatgaaatttattgggaagctgcttctctacattctcatcgctctgttagtggcgatcgctggcctctattttcttctgcaaacccgctggggagcagaacatatcagcgcatgggtttccgagaatagcgactatcatctggccttcggggcgatggatcaccgtttttccgcgccatctcatatcgtgctggagaacgtcacgtttggtcgtgatggccagcccgcgaccctggtggccaaaagtgtcgacattgcgctaagcagtcggcaactgaccgaaccacgccatgtcgataccatcctgctggaaaacgggacgctgaatctcaccgaccagaccgcgccgctaccgttcaaagccgatcgtctgcaactgcgtgatatggcgtttaatagcccgaatagcgaatggaaactgagcgcgcagcgggtaaatggcggcgtagttccgtggtcaccaaaagccggtaaagtgctgggtacgaaggcgcagattcagtttagtgccggatcgctttcgctcaatgatgttcctgccaccaatgtactgattgaaggcagtattgataacgatcgcgttacgctgactaacctgggtgccgacatcgcccgcgggacattaaccggaaacgcgcagcgtaacgccgacggcagctggcaagtggaaaacctgcgcatggcggatatacgtctacaaagcgaaaaatcgctaaccgacttctttgcgccattacgctctgtcccgtcgttgcagattggtcgcctggaagtgatcgatgctcgtttgcaaggtccggactgggcggtgaccgacctcgatctcagcttgcgcaacatgaccttcagtaaagatgactggcagacacaggaaggcaaactgtcgatgaacgctagcgagttcatttatggttcgctgcatttatttgacccgattataaacacggaattttccccgcagggcgtagcgctgcgccagttcaccagccgctgggaagggggtatggtcagaacgtcagggaactggctgcgtgacgggaaaacgttgatccttgatgatgcggcaattgccgggctggaatataccttgccgaaaaactggcaacagttgtggatggaaacgacacccggttggttaaacagcctgcaactgaagagatttagcgccagccgcaatctgatcattgatatcgaccctgacttcccgtggcagctcaccgcgctcgatggttacggtgccaacctgacgctggttaccgatcataaatggggcgtctggagtggctcggcgaatctgaatgccgccgccgcgacattcaatcgtgttgatgttcgtcgcccgtcgctggcgctgaccgccaacagcagcacggtgaatatcagcgaactgagtgcatttactgaaaaaggcattctggaagccaccgccagtgtttcacaaacgccacaacgtcagacacatatcagcctgaatggacgcggtgtgccggtgaatattttgcaacagtggggatggcctgaattaccgttgactggcgacggcaatattcagcttaccgccagtggcgatattcaggccaatgtcccgttgaaacctacggttagcgggcaattgcatgccgtgaacgccgcaaagcagcaagtgactcaaaccatgaatgctggcatcgtttccagcggtgaagttacatcgacggagccggtgcggtaaacatcaatctcgccgggtacgactcagacgtacccggcattccatcaatagattacaacgtaattgtcagcgcattcccttgaggcttcaccaccagcccctgctcactttcagcctgcgaaccgtcttgcagaccatttactttcacaacattgcgcaggcacagtgtccagttcttcgcctcgcccgcaccagtcacagtaatcgtgttgccagtacgtgctgcttttaaagtaaagatcaccgatccgtcagcagcgggcacttcacagacggcttcatgcccgtcttgcagattgaagaggtggaatgccgtgccttcgtgccacacgtaatcgggacgttgatcgttgttgcccagcgccagtagagtgttatcacgcacataaacgggcagactcaggaagccgtgctgctgtttatgccagcgactaccgtcgagttcatcgttgtgccacaggtgtgtccagcgaccttccggcaggtagaactgcacatcgcccgcttcagtgaacaccggcgcaaccatcacgttgtcgcctaacatgtattgacggtcaaggtaatcacaagccggatcgtccgggaactccatcatcatggcccgcatcatcggcgtaccccgcgcgttcgcacgcgcagcttcacgatacagatacggcatcatgcggcatttcagttgcgtgaagaagcgcaccacatcacaggactcatcatcgtaggcccacggcacacgataagatttgctaccgtgtaaacggctatggctggagagcaaaccaaacgcgcaccagcgtttgtaaacgtgcgccggagcggtattttcaaagccgccgatatcgtggctccagaagccaaaacctgaaaggccaatagacaaaccaccgcgcaggctttccgccattgattcgtagttagcgtaacaatcgccaccccagtgtaccgggaatttctgcgcaccgacggaggccgagcgggcaaacaagacagcttcttcctcaccaacggtgtccttgagcacgttccacaccagttcgttgtagatgtacgcataatggttatgcattttctgcggatcggaaccgtcaaaccactgaacatcagttgggatacgttcgccaaagtcggtcttaaagcaatcaacgcccatcgcgaccagacctttcagtttgtcggcgtaccatttgcaggcatccggattggtaaagtcataaatcgccagacctggctgccatttatcccactgccatagcgaaccgtccgggcgtttgagtaaatagcctttctcttgtaactctttaaagacgggggatttttgaccgatataggggttaatccagacgcagattttcagtcctttcgctttcaggcggcggatcatcccttccgggtcagggaaagtcagcgggtcccactcaaaatcgcaccactggaaggctttcatccagaaacagtcaaagtggaaaacatgcagcggcagattgcgttccgccataccatcgataaagctgtttaccgtcgcttcgtcgtagttggtggtaaatgaagtggttagccacaggccgaaggaccacgcgggcggcagcgccggacgaccagtaaagcgggtataacgatcaagtaccgctttcggcgtcgggccgtcgataacaaagtattcgagatattcactctcaacgctgaactgcactttggagactttctccgatcccacttcaaaagagacacactggggatgattgaccagtaccccataaccacggttagtcatgtagaacgggatatttttatacgcctgttcagtacttgtgccgccgtcccggttccaggtctctaccgtctggccattgcgcaccagggcagtaaagcgctctcccagaccgtaaactgtttcgccaacgccaagatcaagccgctcaaacatataattgcgttgattattcgtgtcctgcacgtagccattatttttcacctgactaccggtaatacgttcgccgttgcgcagaaaatccagtgaccagaactcacctttgctgacacgcgcgcttaagttgccacttttaaactcagcataacgttctgtgttttcgattgtgaccttcacgtcctgcaaaatattgagcggataatgaggaccgttattcagcgccccctgaaaatgctcaatccgcacaccgacaataccttcctgtggggagaaaaagcgcaacgtaaataaaggcgtatcaagctgccaggtacgttcacgcacatcacggggggcagcatagaccaccatttcattatcctgctgttcaacctcgaacacctgaagcgggtgaatcaaattgaggccaggttgaatcaaccagtttccatcgctaattttcattgccgttccttagttctgcacttcttgagaggtgaattgttgctggcaacggcgtttaccctgagccagctgttccataacggttttcagattgtgcgtcgtgagtgagtagtagcgtttagcgataatcgcgctcagcaaataacagatcgccggaacaatcgtgaatagcgcaataatgatgctaatcgtggcgctgttctgcgctttttctgccgcatcatatccgccataagccagcatccagccgataagagcgccgccgaaggccaaccccagtttgagcacaaacagcgtgccagcaaaactgatcccggtcaggcgtttaccattgcaccactcgccgtagtcgacggtatcggacatcattacccactggataggtgtcaccagttgatgcaacacaccaatcacgaagatgaagacaaacatagtgatgctggcctgcatgggaacaaagaacatcgcgaggctaatcactgccagcagggcgttcgtccaccagaagatagtgactttacatttccagtcggtcagaggttttgccagtgcggaaccaatcaggttacccacgcaataagtggtgagaaaagcgacaaacacttccggcgtgcccaaaatccatgtgacgtaatacatcatcgccccaccgcgtacgcacaccgccaggatattgaaaatggttagtaaaccgacaatccgccactggtcgttttgccagatatcacgtaaatcttcccgcatagacgttgttgtaggtggtgcttcaacgcgttctttagtggtgaagaaacaaaatgccagcatcatgaatgccaccacggaaaggaccgcgataccgccctggaaaccgagtggtttattatcaccgccaattaaattaaccagtggcatcatcagaacagtagaaagcatgcctcccgcggtcgccagcacaaaacgccaggattgcagcgagatacgctgagtcgggtcattggtgattacaccacccaatgcgcagtaagggatattgacgacggtataaagtaaggtaagtagggtgtaagtaattgctgcatagatcattttgccgttcatactgagatctggcgtgctataggccagtacacagacgatcccgaatggcagtgcgccaaacagtacccacggacgaaatttaccccagcgagagcgcgttcgatcggccaacaaccccatgcaaggatcggaaatcgcatccagtgcacgagcgaccaaaaacatggttccgacaaaaccggcaggaatgccaaaaatatcggtataaaagaacatcatatataacattacgttatcgaaaataatgtggctggcggcgtctcccatgccataaccaattttctctttaacggacaacacttcactcttcatctgcttttccttgatgctataggggtgctgagaccgataacgcattttgtaaaccatccctgtgagagcgaatattccgatatctggttattaatttatgattcttgttttatgtgatcgtggtagcgttaattccgctcatatatcattgtaaaatatgggttttatatgaactataatgctttcgtgataatacgctgcgtgtattaggcggaaaaaactgatctgggggatgtagaaactcaaggaagtagctataatgcgccccgcctccatgtagcaatcgaggcgcggaagatcgtcgtctccggtgaggcggctggacttcaaatccagttggggccgccagcggtcccgggcaggttcgactcctgtgatcttccgccaaaatgcctctcctgacgttctccaaccccttgtaatactgtcaatccagatattttctactgctcaatattcaatcggcttcaggaatacctggtctaaggttttgtgatggacgatgagcggctgaagaatccgcctgtcggttcttctgtcctcgaacgcatccgcgatattcacgccagtatgcgccgtgtttatttgcaggtgatttgcccccctgctgactctcagccaactgtatcgccattaaggtgaagatgttgttttactcgccccagaacacccttttttatacgactattctatttctttaaccgctggcgaaaaaaactgactataaacttcaccaataatcagactgccatcaagattaatttgttcatttaatatatcaaatcaacttgttttatttttactatcaaaaatagctcattgccttactataattaatatataaattcggtaattaattcttaacatgcttttactaataatctcaattgctggccctataatattgcgctagcattgctttctggttgtatcagcgatactcaaaaattcttaatacaatactcattcgactggtacttatttgtaactcagttatattttttcgcccggtgattcagaagaatgcaaaaaacggctaccactccatcaaaaatacttgatctcactgccgcggcatttttacttgtcgcctttctgacgggtattgcgggcgctcttcagactcctaccctaagtatattcctcgcagatgaactgaaagcccgtcctataatggtaggttttttcttcaccggtagcgctattatgggaattctggtcagtcaatttctggcaaggcactccgataaacaaggcgaccgtaaattactgattctgctatgttgcttatttggagtgctggcctgcacgctttttgcgtggaatcgcaactacttcattctcctctcaacgggcgtacttctgagtagttttgcttccaccgcaaacccgcaaatgttcgccctcgcccgtgaacacgccgacagaacaggccgtgagacggtcatgttcagtacatttttacgtgctcagatctcgcttgcctgggttatcgggccaccgctcgcttatgaactggcaatgggatttagttttaaagtgatgtatctcaccgctgccatcgcatttgttgtttgcggactgatagtctggttgtttttgccatcaatacaaagaaatattcctgtcgttacccaacccgtagaaattttaccctccacccacaggaagcgggatacgcggctactttttgtggtctgttcaatgatgtgggcggcgaataatctctacatgataaatatgccgctatttattattgatgaactgcatctaaccgataaactgactggagaaatgattggtatcgctgccggtctggaaattccgatgatgttaatcgcaggctattacatgaaacgtattggcaagcgactattaatgctcattgctatcgtgagtggaatgtgtttttacgccagcgtactcatggcgacgactccggcggttgagctggaattgcaaattcttaatgccatcttccttggtattctctgtggtatcggcatgctttattttcaggacttgatgcctgaaaaaataggctctgcgacaacgttatatgcaaatacttcacgcgtcggctggattatcgccggctctgttgacggaattatggttgaaatctggagctaccatgcgttgttctggctggcgatagggatgttgggtattgcgatgatttgcctgctgtttattaaagatatttagctcaccagtctgggctaagaaaaatcggcgtggcgcaaacagagccatcctcgccatttttgctatcatgcctgcatacataaacgacaaaacagtatgcagagggaaaaatgggttccaccagaaaggggatgctgaacgttctgattgccgccgtgttgtggggaagttcaggggtctgcgcgcaatacatcatggagcaaagccagatgtcgtcgcagtttttgactatgacgcgtttgatattcgccggtttgattctactgacgctgtcatttgttcatggcgataaaatcttttctattattaacaatcataaagatgccattagcctgctgattttttccgtggttggcgcgctaactgtacagctcacttttttgctaaccatcgaaaaatcgaacgcagccacggcaacggtgctgcaattcctctcaccgacgattatcgtcgcctggttctcactggtgcgtaaatcgcgcccgggcattctggttttctgcgctattttgacatcgctggtcgggacttttttattggtgacacacggtaatccgacgtcattatcgatctctcctgccgcgttgttctggggcattgcctcggcatttgctgctgcattctataccacctatccctcaacgctaattgcccgctatggcacgttaccagtcgtcggctggagtatgctgattggcggtctgattctgttgcctttttatgccagacaaggaacaaactttgtcgttaacggcagtttgattctggcgtttttttatttggtggtcattggtacgtccctgacatttagtctgtacctgaaaggagcacaattaattggcggtccaaaagccagcattttgagctgtgcagaaccattaagtagcgcgctactctctttgctgttgctggggatcacgttcacattaccggactggctgggaacgctgctgattctgtcatcggtgattttgatttcaatggattcccgtcgccgcgccagaaaaataaatcgtccggcgcggcataagtgagaattaccagccaggcaccgcgccaccgttaaaaatggtttctgccgctttagcgacttcgggtgattgataagattgcagaaattccttcacgttttctgcattcttattatcttcccgtgccaccaaaatattcacatacggcgaattcttatcttcaataaatacgctgtcgtgcaccggagaaagcccggtctgctgaatgtaagtggtgctgataatcgctacatcaactttgggatcatccagtacgcgcgggagctgcgccccctcgagttccataatctgcaaatgacgaggattatcggttatatccagcgcggtaggtaataacccttttccctctttcagagtaattagcttctctttttgcaacagtaaaagtgcgcgaccaaggttggtcgggtcgttggggatcgccactgtcgcgccttcttttatttgcgccacggttttgatttttttggaataacccgccatagggaagacaaacgtatttcccaccgctaccagtttataaccatgcgcctgattatcttgttcaagaaagggtcgatgctggaagacattcgcatcaagttcgccatgatttgtcgcatcgttcggtagcaacgaaccgctaaatcctaccagttcaacatcgaggccatatttctcttttgccacctttttagcgacttccgcgacatcttgttctgcgccatttataacgccaactttaatgtgttttgcatcgctgctactctggtcgcaacctgccagcagaattccggccagcaataatgcggcccctgtccgtagatgatgtgttgtcagtttcatttttttatccttttattaatgattacctgactatagcggtaaggtcgctgcggtttaaaaaacgaaacgctatcgataagaataaaaaggaataaaagtggaatataaagtctggcacttcttactgaccacgcaagcgcgtttcgtacagcatgatgagagcgatgaaagcaaactacacttatgcttcattcgatacacatttgtaaaaggttgaatccatgaaaccaacgacactactgcttattttcacttttttcgctatgccaggcatcgtatacgccgagtcgccttttagctcactgcagtccgcaaaagagaaaaccacggtattacaagatttacgtaaaatttgcacgccacaggcgtcattatcagatgaagcgtgggaaaagttaatgttgtcagatgaaaacaataaacaacatatacgcgaggccatcgtggcgatggaacgtaataatcagagcaattattgggaagcgttgggtaaggtagaatgcccggatatgtaagaacagcaacaactactgaccaacgcttctttacctgatatcaggatttcttcattttcacctttgcagtaaccaacaatgcagtcagcaacatcaatgtgccggacaacatcaacggcgaagtcagaccaatattatccagcgcataaccgccgattgccgcgccacaggtattagcaagctgaataaccgccacctgaatagacccggctttttctgcctgatcggccagcgagcgggtgatccacgttgaccagccgacgggaaccaatgcaaaagttagcccccagataatcgccacgccggtagcaacgattttatcgcttccccacaacgtcagtaccaacgcactcacagccagtattaacggcgcgcctgctaaggccagttttaccgaacgtttaagaatgaacgacgaaagcgacgtaccaataaagctggcgataccaaaactcaacagcaccagcgttaagccatccacgccgaatcccgccaggttcatatacaccgggcgaatatacgtgaagaaagcaaactgcccggcgaaagacatgaagatggcgatcatccctgccatcacacccggacgttgtaataagcggaaagtattttgtttctgatgcgagggttcgcctggcagtgaaggcaatgatttgataatccagaaaatacacagcacgcccatcaccgccgccgcattaaagacattgcgccaaccgataagctcgcctaaaaaactgcccaacggcgcggcaatcaccagcgcaatagaaaccgcgccgaagatcaccgacagcgccttcggcaccgtacgcggcggcaccagacgcatggtcagcgacgccgacatcgcccagaacccgcccagcgccagccccagacaggcacgaccgattaaaagcaaactgaatgagttagcaaaggaaaccagcaagcaggagagcgtcagcaaaacggcaaacaaaataacaacgtagcggcggtcagtagcctgaattgtctgggtaataaacaaactggcaaacattgccacaaaggcggtcacggtcaccgattgcccggcaaccccttccgaaatgcctaaatcctgggccattggcgtcaacaaactgacgggcaaaaactcaacgataatcagacaggcgacacaaaacgccaccgagaaaacggctgaccagttcggtcgggtgatggcatccgcgccgcggttttcggcaataaattcactcatggtgttacccgtggcatgtttcaggggaaaagccgaccactttaacattgaaatgtgtgacgcatttaacgtttttgcaacttttacggtgttgcttgagctggagttaagatcgaaacggaacagggcaaagattaccggatgcggcgtgaacgtcttatccacccgacaggtcaggcgcggtctgtaggctgataagacgaaacggtttcaatgcaaccagtgaacgccctcggcaggctgaaagaacgcgttatagcgcatctgaaaagcattaatatcctgcatttcaggttcggtttcgcgcagaaaacctagcgccagcctgacctgagcgtcggtaatcggcgcggcgaggcgagctttttgtaaaatccgatgccattgcagcaggttctgttcgctaccatcgacaatgacaatttgccagatgagcaacacctgcgcggcgttttgcaggtgcgactcatccggacgatgcaaataacgtaaaaattcgtcaccagctgactttcccatttgatcgaccatcgactccacgggtacgacatcgatgttcagccgatcgctgagacggcgaatcgcttttctggccccggatgtcagcacccgaaaaccaaccacaaacactaccgccagcgtggcgagcattatccagatcatgagttctcctgcgtaatcagaactcatgatatctggaaaccctcgccagttactaatccaccagaataatcttcagtgcaaacagagctgcgaccaccaccacacacaggttcagatcgcgccagcgcccggtgcatactttcatgatgcagtacgacataaagccgagtgcaatcccttcggtgatcgagaaagtaaagggcatcatcaccgtggtaataaacgcaggcaccgattcggtaaaatcatcccagttaacgcgcgccaggctcgaagtcatcagcacgccaacaaagattaacgctccggcggttgcgtaaggaggaactatcgccaccagcggtgagaagaacataaccaacaggaacataacgccaaccacaaccgcagtcagccccgtgcggccaccgactgccacaccagaagtactttcaatataggcagtaacagacgaggtgccgataaacgcacccgccaccgaactgacgctatcaacatacagcgccttattcatattggggaatttaccgttaccatctattaagcccgctttatcagttacaccaattaatgttcctgatgaatcaaataggttgatcagcataaaggagaaaatgataccggcgagttcaagtgttaacgcgccgctcaaatctacttcaccaatgacgccgctaatatcaggcggaatggaatagacgccgctaaaatgaacatcaccgaaaaataatccacagcaagacgtcaccacaatagaaaccagcaccgcggcatgaaaatgacgtgatgacaacacggttataataaaaaaccctaaaatacctaacaacacgccgtgagaacttaaatcgccaatcatcaccagcgtgtctttattggcgacaataacgccagtattttttaatcccattaaggcgataaataatccaattccgctggtgataccaatacgtaaacttaagggaatgttggagatcatccagtaccggatacgaaacagcgtgagcaaaaatagtccaactgcgccccagaatattgcgcccatcccggtctgccaggagatgcccatcgcccccacgaccacgaaggcaaagaaggcgttcagccccattgccggagccagcgccacgggtaagttagcaaatatccccatcgcaatactgccgataccggcaatcaaacaggtggtaacaaacaccactttcgggtccatttgtgccgcgccgaggatttgcgggttcacaaaaacgatgtacaccatggttaaaaaagtggtcatccccgcaatcaattctgtgcggacggtggtcccatgctgaggtagtttaaataatcgcgaaagcgtccctgattcattactcacgtaatcggtattgtcattattcatttttttgtccattggaggagatttaatcccttgcttttgtaaaacaaatgacaacaacggttcagtgataattatcacatttcaattgcacattaatggatattctttaataatctcgcgacgtttctttatgataaataataatcaaattgataaaatcaaaatgagaaaaatatgaataattctattaaccataaatttcatcacattagccgggctgaataccaggaattgttagccgtttcccgtggcgacgctgttgccgattatattattgataatgtctctattctcgacctgatcaatggcggagaaatttccggcccaattgtgattaaaggacgttacattgccggtgttggcgcagaatacactgatgctccggctttgcagcggattgatgctcgcggcgcaacggcggtgccagggtttattgatgctcacctgcatattgaatccagcatgatgacgccggtcacttttgaaaccgctaccctgccgcgcggcctgacgaccgttatttgcgaccctcatgaaatcgtcaacgtgatgggcgaagccggattcgcctggtttgcccgctgtgccgaacaggcaaggcaaaaccagtacttacaggtcagctcttgcgtacccgccctggaaggctgcgatgttaacggtgccagttttacccttgaacagatgctcgcctggcgggaccatccgcaggttaccggccttgcagaaatgatggactaccctggcgtaattagcgggcagaatgcgctgctcgataaactggatgcatttcgccacctgacgctggacggtcactgcccgggtttgggtggtaaagaacttaacgcctatattactgcgggtattgaaaactgccacgaaagttatcagctggaagaaggacgccggaaattacaactcggcatgtcgttgatgatccgcgaagggtccgctgcccgcaatctcaacgcgctggcaccgttgatcaacgaatttaacagcccgcaatgcatgctctgtaccgatgaccgtaacccgtgggagatcgcccatgaaggacacatcgatgccttaattcgccgcctgatcgaacaacacaatgtgccgctgcatgtggcatatcgcgtcgccagctggtcgacggcgcgccactttggtctgaatcacctcggcttactggcacccggcaagcaggccgatatcgtcctgttgagcgatgcgcgtaaggtcacggtgcagcaggtactggtgaaaggcgagccgattgatgcgcaaaccttacaggcggaagagtcggcgagactggcacaatccgctccgccatatggcaacaccattgcccgccagccagtttccgccagcgactttgccctgcaatttacgcccggaaaacgctatcgggtcattgacgtcatccataacgaattgattacgcactcccactccagcgtctacagcgaaaatggttttgatcgcgatgatgtgagctttattgccgtacttgagcgttacgggcaacggctggctccggcttgtggtttgcttggcggctttggactgaatgaaggtgcgctggctgcgacggtcagccatgacagccataatattgtggtgatcggtcgcagtgccgaagagatggcgctggcggtcaatcaggtgattcaggatggcggcgggctgtgcgtggtacgtaacggccaggtacaaagtcatctgccgttacccattgccgggctgatgagcaccgacacggcgcagtcgctggcggaacaaattgacgccttgaaagccgccgcccgtgaatgcggtccgttacccgatgagccgtttattcagatggcgtttctttctctgccagtgatccccgcgctaaaactaaccagtcaggggctatttgatggcgagaagtttgccttcactacgctggaagtcacggaataataaaaaaagcccggcgtcatgccgggcaaaagtcaccagttacgtttatgccactgtcaactgctgaatttttttctcgcggcggattttgcgttcttccattaccgccactatcgccatcaggcagatacaaccaatcgcggcgatatccagcgcggcgaaggtgcctgcccagccggtaaggccgaataccggcgtcccatcggcaatcattcccagacctaacttggcaaagctgtcaccaatcaggtaagcaaaggtgcctttaataccatcggcagcgccaatcgcttttttaggtacaaagccaacagcagccacaccaatcaacaattgcgggccaaagaccaggaaacccaacgcaaagagagaagccagatagatatattcgttactggcatgttgatacacaccgagcgtggcgataatcagcgccagcgcgatgcaggccaccaggccacggcgaccgttcgccaggtcagagagccagccccacagcagcgtaccgaccagcgcaccagcttcaaacagcgtaaagccctgaatcgccaccgctttagagagtttcagttcctggaacgcgtatacggttgaccactggtcgataccaatacgtaccacatagaggaaaatgttggcgaagcacagcagccagatcactttgtttttcagcacatactcaacaaagatctgccacttggtcatatcggtagattctgtctctttgtcctcttcgctgatctcctcgccgaacagttcttcagctttgccgaggccataagattccggggagtcgctgccgtaacgcaggccgataaaaccgacaatcagcgcgataatcgacgggaagataaacatgccgatgacatggccatcgaacaggtaatttgccccgaacagcgccacacctgctgcgcctgcaccgccaaggttgtgagaaatattccagaaaccgaggaatgtcccgcgtttacgacgcggcgtccatttggtgatggtggagtaactgcacgaaccgccggtactctggaaaaagccgcttaaggcgtagaaggcaatcatcaggaacaggctaaccgagccgctgcccatactggcactgaagcccagcatacaaatagcagagaggatcagcatgaacggcaggaattgtttggtgtttttgccgtcggcgtagtaggaaaccagcgttttacccacgccataagtgatggagaaacccaggccgatcatccccagctgcgtcatgctcaacccgtaggtcgaaatcatatcgttctgcgcgatgttaaagttcttgcgaatcaggtacatcgtcaggtagccgataaagaccaccaggtaggattgcatgaacggtttgaaccacattttgcgccgcacttcgagcggaaggtccagggtcggcttgcgaacctggtttaagaaagccagcatgggttactcctgaaatgaatacctgcgtgaggcatgcattgtaaaaatcagcagcaaatcaggcctgagatagcgtccaggcaaaacctggaaaatttcttagttttgccggatatgaagtgaaaaggtgagatgcatcacgcttcgcgcggtgtctgggcgttcaaaaagggcagtaacagcagtgcggaaatcccggcggcgatagagataaccacaaaaaatccgctccagtgccaggtatcgagtactttcgccagcggccaaccagcaagcgacgcccccagataagcaaacaagccgacaaaccccgtcgccgcccctgccgcctctttgtgggaacactctgccgccgccataccgattaacatctgtgggccaaagacaaaaaaaccaatggtgaagaagcaggttgcctgcatcacgtagctggcaaatggcatcagccacagggagccgactgaaagcaaaattccggcggcgaaaatcaaattcatcggccctcggttgccgttaaacaatttgtccgagccccaaccggctaccagcgcaccgataaatccgcccagttcaaacatcgtcactgccgtattcgccgtgaccagatcgacgcccagtgtctcggacatatacaaattgccccagtcgttgatcgccgcccggaccacatagaccagcacatagcaaaacgaaagcagccagatatacggattcagcaacacatatttggtgaggatctctttacgcgtcaaccctgccccttcttgttgttgagcaatttccagcgcgtcgtgtcgccattcaccgaccgccggtaaacctaacgcctgcgggcgatcgcgtagccgccagcagagaaaaatccccacgactatcgccatacaaccagcaatcatcatcccggcacgccagccgtaatgcagcgcagccgctgccatcacaatgggaatgagtgcgccgccgacgttatgcgccgtgttccataatgcccaccaaccgccgcgctcggtacgtgaataccaggccgttaacagacgcgcacacaccggtgaaccccagccctggaaaaaggcgttcagcacccagagcacggcaaacgcccatagcgacgtcgagaagccaaacagaatgttgataatgcccgtggcgataagccctatccccataaaataacgggcatttgagcgatcgctgacaatgccggagacaaacttcgacacgccataggtaatgtaaaacagggtcgctaacaggccgatatcgctacggctgagcacgccgttagcaaggatttctggtacggcggcgttaaaacttttccgcgtgaagtaaaacagcgcgtaacccagccagatggtcagcagaatatgccgacgccagtagcgatagcgggcatcaatttcatatttatcagtcattaatggcgcatcggcaggcgctttcagaaacggcaacatcatcaaaccttagacatagcgttgaggtagagaaacgctgacacgcgtgccgtgcagacaggaaatgtgtaatgtgccacccagcgccgttacgcgctcgcgcattccggtgaggccaaaaccttgttgcccggaacccggcggcaaaccgctgccatcgtcttcaataaccagcatcaaccgttcatcctgctgccagccttgcagggtgaccgcgctggcatcagcatgtttcacaatgttgttcagcccttcctggcagacacgaaacagcgtcacgcgctggttttcgcttaacgctgattcatcgattcgccattcgagatggctgacaataccgcgcccttccagctccatttcccgcatcagtgagcggatggcctgctccagggtgagatcatccaactggcgcggacgtaaccgacccaacaaacggcgcaccgcgtcgtaaacgcccagcgatagttgttcgatgagctgcccgctctgcttcacgctggcgttatctgccgccagccgctgaacaatgcccgcctgagtacgaatagcagtgatggtctgaccgatatcatcatgcagctcacgcgccacatcacggcgcacgctctcttcggtttccagcaaccgttcagccagatgctgattgcgcgccagttccttttgcagcgactggttaagttcacgcaaccgctggatgccagcgccaagcaacaaccctgtcagactttgcaccagcagcgagagcaataaatccaccggatgatcgcgccaggtttgactggcgatcagcgcgatggcgttcatcaacgtcgcaatcagcgccccttgccaaccatagtgccaggccagcgcgataatcggcagcgccagacagaatggcgtaaagcgcgacagttcgtccggcaatcccaactggagccagagactgataacaaacagcagcaagtaccagaccagatgtcgcccgcgccagttgattggctgagaaaccagtgacggaccgagcggcagccaggtgttattggcgagatagtgccagaacaccagacatatcggggccagcgtcaggccgccagttaaagtcagcaacagcgcattccacgactctttgccgtgccaaagccagggcagcgactgcaacaacgccgccgccgttaacgccgccccctgtaacagcaaggtgcgccagtcacgctgatggcgatagcgcgagatcagcgctacgggcagtaacgtcagtaaactaccgatcatcaataacggaaaatgggttaaaccgaccgcctgcgttagccagtaaatcagcagccactccgcgcccagcaatacgggccagtatccgcgcgggcattgcagcattagccccagacgcagaccaaacggaaataacagcaccgccatatcagggcgctcaaccagatgcaggctgatactccacaggcaaaaccatgcggcagagaagataaaaaagcaggcaataacggtaattaagcgggagaacaacgtcttcatcaccagccatcaaacatgcggcgcgccagctctacgtcgttactgacgcccagtttttccatcagattggcgcgatggacgtgtaccgttttcggtgacaagcccagttcggcggcaatctctttcaccgccattccttgcgccagtttttccgccacctggcgttcacgtttggttagcgggtcctgacgaccggatgccagtttaatggcaatatccggcgtcagataacagccgcccgtggcaaccgtatgcaccgcagcaatgagttcatccgggctacagcgtttggaaagaaagccgcgtgcccccgcgttaagcgcctgctcaaccagcgcaggactgtcgtgaacggagagcataatcgtcgccatacctttcggcagctggcttagcagctccagaccggagatatcgggcatggagatatcgcaaatacacacctgcacaccgcgccccggcagccccgccagcgcctcgcgccccgaaccaaactcggcaactacctgcaaatcaggttccagccccagcagctgcgcaaagccggagcggacgatgaggtgatcgtctataagggcaacggtgatcatggtcttgtcctggcgggtaaaaaaaatacgcgcttaccttaacgataagcgcgatgttgttcaagccttgagcggttactgaaaaaacaccgcgatcttgttaaacatcgtcggatcggactgattacgctgcactttcacgacatcttccagcttatcgatttggcttatcatctgctccagacgctggtcgtcattgaccagtagccagatatggcttttgtcgctgtcctgaatcggcagacaaagaatgccttcaacgttaaaagcgcggcgggcaaaaaggccacaaacgtgggtcattacgcccggatggttgcgaacggtgagctccagaattacgttgtcatgagttgtgttttgcatggcttattcccccaccatttcagtattcgccgcacctggcggcaccatcgggtaaactttttcttcggcatcaatgcgcacatggatcagcgccgggccagggcgattgatgatttcctgcaatgaagcctgcggatcggcttcgttattcaaatcacaggtttcgaggccgaatccggcggcaatctgcataaagttgattttgcccggataggtggcggcaaaaacgccttgctcgtagaacagactctgttgctgatgcaccagccccagcgcttcgttgttcatcagaatgattttgacatccagctgattttcactggcggtcgccatctcctgaatattcatcatcaggctgccgtcgccggagaaacacaacactttgcgatccgggttcgccagcgcagcgccaatcgccgcaggcaggccaaaacccatcgtgcccagcccaccggaggtcagccactggcgtgggcgattgagcggataagcttgcgcggtccacatctgatgctgaccaacgtcggtggtgataattgcattgtcatcgacacaggcggcaacggcgttgatcaggccgtaatggcttaacggatcgcacgctttcgggattggacacggaaactcacgctgcaaatccgctaccaactggtgccactctgcacgcggttgcgcttccaccagcgggatcaactgcgccagcacgtcatcaacatccgcctgaatcgccacgtgcggctgcttgattttacccagctctgcacggtcgatatcgacatgaatgattttggcattcggacagaactgctcggttttgccaatcgcccggtcatcaaaacgcgcaccgagcactatcaacaaatccgcctcctgcaaaatatagttggtgctgcgcacgccgtgcatccccagcatacccagcgacaacggatgcgcttttggcaacatgcccagcgccattaaagtcatggtggtaggcagttgcgctttctccgccagttcacgcacccgtgcgggcgcattgatcacaccgccgcccagataaagcaccgggcgtttggcagcgttaatcatcgccgctgcgtcacgaatgctttcttcgctaaaggcgggggcggcggctttttctgccatagcgggctgtgtttcaatctcaaaaactgccgtttgcacatccttaggaatgtctatccacaccgggcctgggcggcctgattgcgcaatgcggaaggcatcgctcatgacctgcgggagttcttcgatatgtctgaccagatagttgtgtttggtgatggggatagagatgccgtaggtgtccacttcctggaaggcgtcggtgccgatcatcgaggcgggaacctgaccagtgatgcaaatcagcgggatggagtccagccgcgcatcggcaatggcggtcaccaggttagtcgcacccggtccgctacaggccatacagaccgccggtttaccgtcggtgcgcgccattccctgagcgataaagcccgcgccctgttcatgacgggccagaatatggcggatttgcgtgctttggcttaaggcatcgtaaacaggcaggatagaaccgcccggaatgcctgtcacaatcttaatgccctgctgttccaggaaatgaacgataaattctgcgccggtaaagcgcttacgcgtcgatgttgtgcccgaacttgccatgctccagtccttttcttctgggccgactttccgggaggtgcttaaacgaaaaaccccgcccggtttgcgccggcggggttttggaatcgtgtgttgttccagtccctacggcgcattgccgacgaccaccaccacacgcacgacgaccactgcggcggatggcgcagttggtagtagttttgcgttgagcatggaagtagtcattggggaccttgttggttttgtgtttaacaatatttatacaagcacagctttacaggggagacaatggaaaatttttcagcaagggaaaattgaggggttgatcacgttttgtactgaattgcagataacaaaaaaccccgccggagcgaggtttcgtcagtcgcctgcggctggtaaccgcaaagcacactgtattatgtcaacactgaaagtatacgtgttccgcgcagaacgcgcaatttcggcacgaattttgacgtatttagtgcatagttgagtatcgatcacagtttgcgttttgtccaaatattactgtttatttatacagtaaacttctataatatcactgtacgcaatgtgttatgcgggggccgcatcgttacccggcgcactaagtcctggctgaaacgggtggtgccgtcagcgccttaaccccgcgtgagcacactgtgttatgtcaacaagcacaacgtttctccttgagataccgcgtgcacaacagctggcaacaggcagcggaaaggtacgtcagctggcagtgctcctgaaccacaggagacgcgtatgaacctggtggatatcgccattcttatcctcaaactcattgttgcagcactgcaactgcttgatgctgttctgaaatacctgaagtaattcagattcaagtcgcaccaaaggggagcgggaaaccgctccccttttatatttagcgtgcgggttggtgtcggatgcgatgctgacgcatcttatccgccctaccatctctcccggcaacatttattgccgcttttgtttacatattctgccgctaaacaattccccattcctggcgtatatctggctaacattcatcaatgtgatagattcctctcccgcatttatgggaatgcgtagtgacttattctaattatttttataaaagcatccgtgataatgaaaaggcaaagaaacgtcaatttgttattgatgttggtattactcgtggccgtcggtcagatggcgcaaaccatttatattccagctattgccgatatggcgcgcgatctcaacgtccgtgaaggggcggtgcagagcgtaatgggcgcttatctgctgacttacggtgtctcacagctgttttatggcccgatttccaattaataataacgcgtgggccgccgaccggtgatcctcgtcggaatgtccatttttatgctggcaacgctggtcgcggtcacgacctccagtttgacggtgttgattgccgccagcgcgatgcaggggatgggcaccggcgttggcggcgtaatggcgcgtactttaccgcgagatttatatgaacggacacagttgcgccatgctaacagcctgttaaacatggggattctcgtcagtccgttgctcgcaccgctaatcggcggtctgctggatacgatgtggaactggcgcgcctgttatctctttttgttggttctttgtgctggtgtgaccttcagtatggcccgctggatgccggaaacgcgtccggtcgatgcaccgcgcacgcgcctgcttaccagttataaaacgcttttcggtaacagcggttttaactgttatttgctgatgctgattggcggtctggccgggattgccgcctttgaagcctgctccggcgtgctgatgggcgcggtgttagggctgagcagtatgacggtcagtattttgtttattctgccgattccggcagcgttttttggcgcatggtttgccggacgtcccaataaacgcttctccacgttaatgtggcagtcggttatctgctgcctgctggctggcttgctgatgtggatccccgactggtttggcgtgatgaatgtctggacgctgctcgttcccgccgcgctgttctttttcggtgccgggatgctgtttccgctggcgaccagcggcgcgatggagccgttccccttcctggcgggcacggctggcgcgctggtcggcggtctgcaaaacattggttccggcgtgctggcgtcgctctctgcgatgttgccgcaaaccggtcagggcagcctggggttgttgatgaccttaatgggattgttgatcgtgctgtgctggctgccgctggcgacgcggatgtcgcatcaggggcagcccgtttaagcgcacgtcaccgcagcatcgtcatcagctccatgggagaacgatgctgctttatcagatcacgcatcacccgcatatgcggtgcggagtaagaataaaacgcctgatagcccgcacaaagcacgctgtctggcgtctcctgccgagcgtgcgggcacaggcgatgccagtcgcacgcctggcagtcacagcgcggttgcgggttttcgctgccacaccatttttgtaaggtggcgtcaaaaagctcaatcgagatacgactgatatctgcccgcacccaacactcgaacagggcaattaaaaatttcccccacagctctgctgtcaccgaagcggccgtcagatcgccccggtcatcaaattcaagatagggaatgagctgtacggagcggatgccccgctgtttgaaattgtgataaaaatcggcaggttgcagagcatccttgtactctacaaccagtttatgcctgtcctcttcagcatcaatgacctgacttcctgtcatgcgactctctcaataaatacgataagttgatgtatatgcgttacagcaaacagtattgcgagagataacaccgcgagggagatcaaaaatttgtcacggactacgtgaaattgggaaaaatcgctattcgtgacatccattaaattgcgattacgggtgtagtgccagaggatcagcgccacgatggcgagaatgccaatcgaaatccagaataacatgcccgcctggtgccagttgtgtttgatagccaacgccatcaacgcgccgtagcccagcatggtacgaaaccacgccagtgatgtgcgctccggctgcagtcctgggtcggcaatgcgtctggctttgcggctatccggcatacaacaccagtcccataacgatcaccgccacgaccatcaatattaagctaatgattaataagctgttggtgtagggcaggtcctctttcagacgcatcgctttttcattgcgtaaccagcgcaagtagccatacatcgctaacccgccggaaaacagacacaacaacaacgccagcagttcgcgaatgacgggcgtggcgaaatctggcgcaagttgatcaagcccaacccccgccgccagaaatcctagtgcagtacggatccacgccagaaaagtacgctcattagccagcgagaagcggtaatcaggcgcttctccgaggcgggaaattttcattgttgctcctttgcaatttcactaacgctctacctttagcggtttttttaagaatttcgtccgcccgtttcctgatatgcttttgccatccgctacaaggaggtcagatgggtatcatagctcaaaataaaatcagttcattgggcatgctgttcggtgccatcgctttaatgatggggattatccacttttcattcggccctttctccgcaccaccgccaacgtttgaaagcatcgtggcggacaaaacggctgaaattaaaagaggtcttctcgccggaataaaaggcgaaaaaattaccaccgtggagaaaaaagaggacgtagatgtcgataaaatcctcaatcaaagcggtatcgcactggccattgctgcgctactttgcgcatttattggcggtatgcgtaaggaaaatcgctggggcattcgcggcgcgctggtttttggcggcgggacgctggctttccataccttgctttttggtatcggcatcgtgtgcagcattttgctgatattccttatcttttccttcctgaccggcggttcactggtttaagcagcctgaataatgcccgccgggtgatcatcagcgggcattatcgtcagaacttctgttttttctcctccaccttcaccccttgtgtcggtaggccggtgtcatagtcgcgtacaactggcgaatagccatcttgtggacgtggacgaaacgcccccatccagcgcggccgtgcatctttacgccacggacgcagactccattggtaactgcggaacggatcgcgaattttgtccatgtaatccaataaggcgtcatgcattttgctgcgaacgtctgcaaaacggatatcatcgatcaggttatgcatttcatttgggtcattacggcgatcgtaaagttcatcactggtgaagaggttgagtaccagtttaaagtcatccgtcacccagcaacgcaccggaataaaaccgccaaagctgtcatgctcaatctcgtagcggttaaattccaccatcacgccgcgtggctctttcacggcaaggatattttcccccggcagaatctctggtttttcaatatctgccagcgccatcattgtcggcagtaaatcgatatgactgactggcgtatcgacctgtcgccgctccccttgcggcgaacggatgatcagcggaatgcgggtgatgtcgtcatacatcgccgcccctttactgatcagcttatgtgcgcccatcatttcgccgtgatcggaggtataaataacccacgtattttcacgttgctctggcgttaaggcattgatgacccgtccgatttggtcatcaacaaagtcattacaggcaaaatagagcggatggtgataaagcccgtcatcaccgactggcgatggcatcgcctgcgcccataagcggtgatgttccggtttgttagccaggtcatcctgtgctttctcgcccagctcgtagtaaaaatcagcgtatttctctaaatactccaccggacaggtgaacgggtgatgcggctcatcatacgaaaccaccatcaggaaaggctcgtctgcgcgcgcaggctgttgcagaaaatccaccgcccgattgctgatacgatgcgcccaggtgaaggtttcgtcgatatggttcgcctgtaaatcttcgacgctgtttaggccattgcgccacaggctaatctctttttccgtcagttcgctaagatagttcgccccatcgaaccagtaatcagcgtcccactccggcggacactcgccagtgccgaaatagtcatgaccgtcgagatgccatttgccgatgtaacaggtgtgatagccggcatccttaaagtagcgccccatagtggagatgtttttgcctggcgcgacgttgttggtccacgggccggactggttagcgtagataccggtaaatagtccggcccgtgcaggcgtacaaaccggtgaacaggtgtaggcggaattaaagcgaataccttccgccgccagactatcaatattttgcgtattcagcggtttaccgctatagcaaccgaccatattggtggcctgggtatcggtcatgacgaacagaaaattggggcgtttcataggctatccttcccgtcgggagtaaaggttacggctgggtcgtgacgatgccgccagctgtcaaaaatcaggtagacaatcactacggcggcaatgaaataactgatcatcgctaaccagcgcgtaccgtagccgccgaattcagccagcccggcatagacgccaatcatcgcgaacaggatgccaattgacgcgatcttgacgtttttccacggtttcatgtccaccgcaaacgcatctttgaaggtgaacggcgtggcgcgcggtttgataaaaccgatcaccagcatcacgaccacgttgatgcagaacgtacaggccagcacatagaggaaatggaagtcgaacttcaccagatagttgatggtgatgtagctgattatgccaatccccatcgctacttttgccgccagcgccgggatgcgcgggaagaaaaagcccataatgatgatggtaaccagcggcacgttgtaaatgccgttgagctgtttcatccagctatacagcccctgcggcgcgttggcgatccacggcgcgaccagcaccgaaacgatagcgataaagaaaccaaatttgcgcccgacggtgaccagctgctgcggctcggcattctggttaatgatgcgacggtaaatacccatactgaataacgtactggcgctattcagaaagccgttgaaggtactgatcaccgcaccaaataacaccgcgccgaagaaacccaccattggcactggcagaacgttattgaccagcgtcgggtaggccatgtcggctttcggtaaatcctgatacagatgaaacgcaatcaaccctggcagcaccagtaccagcgggtcgagcattttcagcaccgccgttaacagcgcccccttttgcccttccgccaggctttttgacgccagcgtgcgttgcacgatgccctgatttgtacaccagtaaaaggtgttcaccagaatcaaaccggtaaatgccgcgccaatcggcaagggatcggtcgggccaccgattgagtttaatttctcggcgtgaacggtggtgagttgctcaatgccctgcataaagctgcccttgcccatcgcgattaggccaaataccggcaccatcaacccgccgataaccagcccaataccgttgatggagtccgccactgccattgcgcgcagtccgccgatcaccgcatacaaaattcccgccagaccaagcaaaattaccagtagccagatagccgcaccgtgagaaatctgtagcgattccccgacgtgaaacaggctgttgagcgccaacgcgccggagtagagaacaatcggcagaaagcagacgccggtggcaattaggaagcagaagtcgatgataatacgcgtcgttttatcataacgttcctccagaaaatcggggatggtggcaatgccgcgcttcagatagcgcggtaaaaagattagcgcgaggaagatcagcgtcaccgctgaagtcacttcccagcccatcaccgacatgccgcttttgtaggcctgcccggaaaggccgaccagttgttccgtggaaaggttggttagcattaacgaagcggcaataaccggcgcttttagtgaacgtccggcaagaaaatagccttgttgcgatccggtatctgttttgcggaccttccaccaggtgatcaccgccaccagcagcgtaaaaccgacaaaactcaagatttgtaacgaattcatctcatagcccttatttatgtttatgtcccggacgcatgaatatagggagaggtaaaatgcgtcgggtcaggcagtcagattcttaaaatacaaacgtcgtatccctgaacggattgttttctgttaagttcaggttgtgagcataattcgccggagggatattaaaatgaatggaaaattgcaaagttcagatgtaaaaaacgaaactccgtacaatattcccttattgattaacgaaaatgtgatctccagcggaatttctctgatctcgctctggcatacctacgccgacgagcattaccgggtgatctggccgcgggacaagaagaaaccgcttatcgccaactcatgggttgcggtgtataccgtacaaggatgtgggaaaattcttttaaagaatggcgaacaaataacactgcatggcaactgtattatattcttaaagccaatggatattcactcttatcactgtgaaggtttagtctgggaacagtactggatggaatttacccccaccagtatgatggatattcccgttggtcagcaaagcgttatttataatggcgaaatttataatcaggaactcaccgaagttgctgagttaataacttcaccagaagcaataaaaaataatctggcagtcgcttttctgacgaaaattatttatcagtggatttgtcttatgtacgcagatggtaaaaaagatccacaacggcggcaaattgaaaaattaattgccactttacatgccagtctgcaacaacgctggagcgtagctgatatggctgccacgatcccctgtagcgaagcctggttgcgtcgtctgtttttacgctataccggcaagacgccgaaagaatattacctcgatgcgcgtctggatctggcgctatcgctattaaagcaacaaggaaactcggttggcgaagtcgctgatacgctcaacttcttcgactcctttcatttcagcaaagcctttaaacataaatttggttatgcgccgtcagccgtgctaaagaatacggaccagcacccaacggatgccagtccacacaattaacgtaactctggccagtacgctttgttggcctccagcaactcatccagaatagctttggcgaccgaggcgctcggtaccgttttcgacaacgtaatcgcctgccacaggtgctgatatgaacgctgttcccaggcgtccacgaccagtttttccaccgccacttgctgactcattaaccctttctgaaactgcgggatatcgccgaccaccagtggttcaggccgtagtagcgcacgcgcatctgtttgcgatcttgcagcccaacaatttgcgccatccggctttcaataccgattggcatgtcacagatgttgaggattttcgcattcgggcgcagacgacgcgtggcttctgcgacaatggctgccgggttggagtagttgagcatccaggcatttggtgaatatttttccatataatccaccagttccaggacgccgccaatggaacgcatgccgtacgctattccgccgggtccgcaagtttcctgaccaacaacgccgtggcgcagcgggattttttcatccagttcgcgcatcgggtatttgccgacgcggatgtgcgccatgacaaaatcaacgtcgctgaatgccacttcaggatcggtggtgtaactaaacgcaatgtccggcgctttttctttaaggatgactttacaggcttcggcaatcacttcctgccgcgcaccatcgttatcataaaatttcagtgcacgaagcgggaaacggtcctgattcgccaggagcatcaacacgatgcctggcgtaaaggtgcttccaccgcctgcgacaaccactgagaatttggtcattatactgcctccgtaatggcaacattttctgctgattgatgagaattaattaagctatcgagctgttcacgcagctgagatacatgcagaccaatgatcacctgaatggcatcgccactacggaagacgccgtgcgctcccagctttttaaagacttcgtcatccagcgtttgtgacatgtcatgcagtgcaatacgtaaacgcgtcgcgcaattgttaatgctggagatattgccgaccccgcccagggcttgcaggataccggcagcctgatccagctctttttttggctctgccgcggtggtttggcctcgcgaggctttgtattcggcttttgagtagagtttcacttccgcatcttcacgtcccggcgtgcacatgttgaactgcagaatcagtgtgcggaaaaccacgaagtacagcagggtaaagcacaacccaatggcgatttgggtcagcatcatatccgcgtggttgctgaacatcgggatccagttttgcggtaaaacctagtcaatcagacctccgcccatgttgcccaccacaccaaagagatacattacggtcgacattgaggccgccagcacggcgtgtaccgcaaacagcaacggtgaaatgaacaggaaggtaaattccagcggttcggtaattcccaccagcatggcggttaaggttgcgggaatcagcaagcccgccacttttacccgattttccggtgcggcagtgaagtacatcgctaaagaaatgcccacggcaccaaagatttttgagttaccgtgcagggcaaaaccgccttccgggaacaacgatttcagcggctcggcgctcaaactgaactcttgcagatgctgcgcccagtacatctgaatgccgccttcaacagctgccggaccaaagataaactgtccgtagatgaagtggtgtaaaccggttgggatcagaatacgttcgaggaaggtgtaaacccagaccccaagtgcacccgccgaacgcaggaacgcttgcagagattcaatccccatttgtacttttggccagccgagcaacgtcagccaggcacaggggatcatcaccaggaaggcgataatcaccacataagacgtcccctggaaaatgccgagaaaaaccggcagttttttatcgaacagacggttatgcagcgccgtcacaatgccggaaatgataattgcgccgataatgctggtatcgagggttttaatcccggccatcattgtcagaccgctacctgccaccgcgtcctgagtgaaatcgacgccgaagtagcttccccaggtcattcccatcgcgttgatgaaatagttccaggtcaggaaactcaccatcaccgccagacaagcacgcccctgcgcttgcttagcaaggccaatgggtaaaccgacagcaaaaatcagcggcatattacggaataccgtccaaccgccctcttcaataatgtgtacgatttgcgcgaataaactgttcggatcggtcagtgattccccgacaaacatcgggttttgcagcaagatggcaagacccaccacaatcccggcgaagggaaacagcagcactggcgtgaacatcgcgccgccaaagcgttgaatttgactgagcatttccacatcctcttttctcaattctgtaagtaggaagcctgattggttatgcggcaggcctggagcgaggataggaagatgcgatcggcagaacatgacgacccaatgggattcgtgatcgctttcatgcttttcgttgggcggtagagatctacgttttcgcgaaaaagtagacctctgtgagcacaggtacacagcatcgaacacatctttaaaaaaaagatgttttttcaatcgattaagcagaacttgtgtgcgcattacccgggcttgcaggcaaaaaagagatctagagatgatctacaaaagcattgcggagcggttaagaattcgacttaactccgcagatttcacgctaaacagccttcttcccggtgaaaaaaagctggcggaagagtttgcggtatcgcggatgaccatccgtaaagccattgacctgctggtagcgtgggggctggtggtccgccgccacggtagtggcacttacctggtgcgcaaagatgtactgcatcaaaccgccagtctgaccgggctggtggaggtgttaaaacggcagggaaaaacggtcaccagccaggtgctgatttttgaaatcatgcctgcgcctccggccattgccagccagttacggattcaaatcaacgagcagatctacttctcccgtcgcgttcgttttgtggaagggaaaccgctgatgctggaagacagctatatgccggtaaaactgttccgtaatctttcgctgcaacatctggaagggtcgaagtttgaatatattgaacaagagtgcgggattttgattggcggtaattatgaaagcctgacgccagtgctcgccgatagactgctggcgcggcaaatgaaggtagcggaacacacgccactgctgcggatcacctcgttgtcatatagcgagagcggggagtttttgaattattcagtgatgttcagaaatgccagcgaataccaggtggagtaccatttacggcgactccacccggaaaagagttaaccgatactccagaagagcaccgccagtaattggggggtgataatgcgcaggaacattaccaacggatagacagtggcgtaagagagcgccgccgcaccgctggttggatgaagattattagcaaacgccagcgccggaggatcggtcatggaacctgccagcatcccgcacatggtcaggtaattcattttggctaacatccgcgccagaatgccaacagtaatcagcggaacggcggtgatcagggcaccataaccaatccagcttagcccttcgccattgaccagggtattcacaaaatccccaccagatttcagaccaacgaccgagaggaacagcacgatccccagctcccgcagcgcgaggttggcgcttggcggcataaaccagtacagcttgccgatactgccgatacgcccgaggatcaacgccataatcagcggtccgcccgccagccccagtttcaacgcggccgggaatcctggcacaaagacgggaatagaacctaacaatacgcctagcccgatgccaataaacactggcagcatctgaacctgttgcagtttttgctgcgcattccccagcacattggcaacggcatcaattgcggacggacgccccaccagattgaggatatcgccgaactgcaggctgatatcgccactggcgaccagttcgaccccggcacggttcaggcgcgagataacaacgtcatagcgttctttaaagtgcaggtcgcgaatacgttttccgagcacgttttcattggtgaccaccacacgctcgacgcgcaaatcagtgcctttcgtggacagcgaagtatcgacctcctgaccaatcaccagttgcgcattatgtaaatccgctggctgacccaccagatgcagcaaatcgcccagttggataatggtatctggcgaaggaacttttagggtttcttcgcgtttcagacgcgagcagataattttgtcgccgttgagaatcggtacatctttaatggctaaatcatgcaggttagggttctcaacgcgaatattgatagtcttgatcagcgcgccgccattggtgcgtgaagactcgtgctgctgagcttctgtctcgacattgacgcggaaaataacccgcaacatccacatggtgaacaaaatcccgcaaatgccgaatggatacgccatcgcgtaactcatccccatctgatcgaccatttccattggtgtacccaggtcgcgcaaaatctgctgccctgcccccagcgctggcgtattggtaaccgcaccggagaaaatccccagcactaccggcagtggaatatcaaacagtttatgcaggatggcggtaaccagaccaccgatgatgacgatcagaacagcaaacaggttgaggcgtaatccggagacgcgcaatgaggcaaagaagcccggccctacctgaatcccgatagtataaacgaacaggatcaggccaaattcctgaataacatgcagcatatcgctacttaatgtcatccccgcctgagaaacaaaatggccgacgatgatcccaccaaacagcacgccgccaatacctaatcctatgccgcgaaatttgacgttgccgataaacaaaccgacgactgccaccaaagccagaatactgaccgttaatgctatatcactcatcgtccatttctcttgagataacattttaattgctacggattatggctgaatcggtgaagcagatttgccttatagcgcacattatcacgggaaagaacgtgccgaaatatcttaaacagtcgaaatttaacgcattgttgagtaagtaagacaaaaaaagccccaccagaatggcggggcaaagagaatagctagttagctatttaacgcgggacgttcgctgatagcgatacgctgcgctgcgatgggttcaggctcattacgaattaaatcaatatgcagtaaaccgtttacgaaggttgcgccagagacttccatattttcagccagcgtaaagctcaggctaaatggctgattcataagcccttgatgcagccattttttctcttcttttggctgctccggcgtgccttttacgctcaggcgcgtaccttccagttgaatctctaaatcttcctgacggaaacctgccagcgcaagggtaatgcggtagtggttatcgtcgcttttctcaatgttgtacggcgggaagctctggctttcaccggcgttttgcagtgcgttggccagtttgtcaaaaccgatccattgacgcatcagtggggataaatcgaagttacgcatagtcatttctccttctaagaagcgagtaagtacctgcaaatccgaagattcgcatatgctccctgacggcgagcatggagatgtcaggccgcgccaggcggccttagggaattagttgatttcgatacggcgcggttttttcgcttccggaatcacgcgttcgagatcgatatacagcaaaccatttaccaggttagcaccacgaacatgaatgttctcagctaactggaatttgcgttcaaagttgcgttcagcgatgccctggtacagataggtgcgctctttttgttcgtcggcgtgagcacctttcaccaccagcagattatcctgggcggtaatttccagttcgctctcagcaaaaccagccacagcgatagcaatgcggtaatggttttcgtctaccagttcaacgttatacggagggtagccgccattactctggctctggttgttttctaagtggttaaacaaacggtcaaatccaatagcagaacggtaaagcggggataaatcaaagttacgcataatcaatagctcctgaaatcagcgagaatgtaagaccttccacaatggacaggtcaggtagccagaacacccatcaggcgcgtcctcatcggctacgatgtaaaaatgggtctggaaatgaacttttcaagccttatcagcggacttttttttgcagtttatggtctattgcatagactgagggggcagcacgaaacgttaaagtgcgatagccgccacagtgcgacgtaatgatgatgttattttcagcaagggatcgctataactcatcaggccaacacccacgatcaacagatgaatttattatgataagaaatgtgttgttagcgttcatgatatgcagcggaatgacattactcggaggatgctccagcgtgatgtcccataccggagggaaagaaggaacgtatcccggcacccgcgccagcgcaaccatgattggcgacgatgaaaccaactggggcactaagtcgctggcgattctcgatatgccgtttaccgctgtgatggacacgcttttactgccgtgggatgtgttccgcaaagacagctcggtgcgctcgcgcgttgaaaaaagcgaagccaacgcgcaagccaccaatgcggttattccaccggccagaatgcctgataactgatttagcgatcagtttcggtgatccacagctggccgccttccatccacgccagccactgaccatccggcgagaagaccacggcgtccgcagaaggtgaattggcgtggtgttcggttaaatactcaacctcgccgctttgcgcatgggcacaagcaattcgattatccagcacaaagcccaaccattctcctgacggatgccagttaaatgcagactgaatatccgttttgttatgggttaactggcgcggctcgccgccctgtggcgagataagccacagttgcacaatgccgttatcatctcgcattaaaaacgcgatttgtgtaccctgcggattacagcgcacccagtggcgcgggacgttgactaaccccggataagcccgatggtgggtaaaggttaaacgtcgctgcacgacgccacgcggtggcgcgggcagggttgtttccgttccgcttaacggcgcatcacctgccgctttccagccagcttcatcttgcggtaactcaacgataaacagctccggcactttctcgccctttggcgaaagtgtgtcgccaataaatgccagcgcgtgatttcctacccatccttcttcataagcacgattgatttcatcactgccaggctgtggcgtgggcgtggttttgctcaccagcacgcaccagtggctaccgctgtattcacgcggatgctgcttttgtacgttgaccgggccaaacggcgcagcaacaccgacgtttcgcaaatccagcgccggatcgagttcatgcattacatggtcgttataggtaaagctcaccctttcaccgttcgggctaaagacatgcacatggctgccgccgcgcagcactcctggcgtatacggcgcggtaatatccatcgcatcaaggttactcatcttgccgccttcaacaatcactccgcgccgatgatggaagtcgtaatgccatgtttcatcaggattttccgggccgtggatgaaaacatatttctctgacttcggatgaacggtcaccacgccgacgtgtgcgccctgtgacgcgcgatagataacctcgacctcgccggtatggatattcacacgctcaatggtctcgccggtaaacgacgcgccagaaggacgcacgtcaaataccagccactggctgtcgggcgtccaggtattggtattggtgagcaggtgattacggggagcaaaggttatctgtttcatggcgcggtcctgatacaaaacgggtcccgccatcatacttcacaaggacttcactttcagacaatagtcttttgccatcgtgatgaatgtgagtgaaaagatggaacatttcgacgtggcgattattggcctcggcccggcaggatcggcgttggcacgaaagttagcaggcaaaatgcaggtgatcgcgctggataaaaagcaccagtgtggtactgaaggtttcagcaaaccctgcggcggtctgctggcaccggacgcgcagcgatcttttattcgcgatgggctgacgcttcctgtcgatgtgatcgctaatccgcagattttcagcgtcaaaaccgtcgacgtcgccgcatcgctcacgcgtaactaccagcgaagctatatcaatattaatcgccatgctttcgacttgtggatgaaatcgctgatccccgccagcgttgaggtttatcacgacagcctgtgccgaaaaatctggcgtgaggatgataaatggcatgtcatttttcgtgcagacggctgggagcaacatattaccgcccgctatctggtcggtgccgatggcgcaaactcgatggtgcggcgacatctctacccggatcatcaaatccgtaaatatgtcgctatccagcagtggttcgcggagaaacatccggtgccgttctactcctgcatctttgataattcgataactaactgttattcatggagtatcagcaaagacggttattttatctttggcggtgcctatccaatgaaagacggtcagacgcgtttcacgacgctgaaagagaaaatgagcgcctttcagttccagtttggtaagacggtgaaaagcgaaaaatgcacggtgctgtttccctcgcgctggcaggattttgtctgcggtaaggacaacgcctttctgattggtgaagcggcgggatttatcagcgccagctcgctggaggggattagctatgcgctggatagcacagacattctgcgttcggtgttactgaagcagccagagaagctcaataccgcttactggcgcgccacccgcaaactgcgtttaaaactcttcggcaagatagtaaaaagccgatgcctgaccgcaccggctttaagaaagtggattatgcgcagtggtgtggcacatattccacagttgaaggattagccaacgcgcttcacatcgcccaccagcaggatataagagagcgcgccaatcaacgcgacggcggagatataaaccagtgcaggtgcgaaaccgtaaccctgcgccaggtaccccaccaccagcggaacggtgatgccgcccagaccaccggcgaagttaaacacgccgccggttaaaccaatcaggcgcatcggtgccagagaagaaaccagcgaccaggtaatcgaagcaaaaccgttaccgaagaatgccagcgccatcaggcacataatcatcatcggatcgttagtgtagttagcgcccataatgcaggtggagatcagcaagccgcagataatcggcgttttacgcgcaaagcccagtgaaaagcccttacgtaccagcagatccgctacccagccagagagcaggacgccgacaaacgccgcgaggaatggcaccgtggtcataaagcctgctttcagcgccgtgattcctttttcctgggttaaatagttcgggaaccaggttaagaaaaaccacagtgtagaagccaccgcaaattgcccaagataaacgccgatcagtttacgatggaacaccagtttccagtctttggctgttaacggctgacgcgcctctttcttcaccggcgcatcaccatccaccagaccgccgccatcacgaatgtaatccagttcagctttgctgatacctttggtcaggcgcggcggctgataaaccttaaaccaaatcagcgaccagataatgccgataccaccagtgacaatgaacacccagtgccagctcaacatctcctgaatccagatcagcagcggcgtcagaaacgccagaccgacaaactgaccagacgtataaaaaccaacggcagaagcgcgttcatgttccgggaaccagctggtcaccatccggttattggtcgggaaagcaggcgcttcgaaaataccggttatcgcgcgcagaccaattaatgacattaagcccgtggcaaagccctggaataaagtcgccactgaccagccaaatatcgcaataaaataagtcacgcgagaacctacgcgatctaaaaaccaaccgccggggatctgacatagcgtataaagccaggcgaaggccgaaaatacatagcccatttccgctttggtaatgccgaactcttcctgaatatgggcggaagccacggccaggttggcgcggtcgacataacaaatgactaccgtaataaagatcatcaccagcgtcagataacgccgacgccccggctttgctgcattaacgggaatatccatagcgagctttctccagattttgggcatagcgaagccgctcaccatgccctgtaatttacagagggttatatttttgtattgctgttttagtgcccgatgaggggcttacgtggcaggaattaccactctgctacgctgttatcttcatgacgccagagcggattacgccagtccggggcatttttactgaactcaatcactttagcttcgtcgatttccacgcctaagcccggtttcgttaacggtttaaagaagccgccgaccatgctgaagtcttctttgtttttcacaaagtcgagtaactccgcgcctttgttgtaatgaattcccatactttgttcctgaagtacggcgttataggaaacaaagtcgatatgcaggcaagccgccagtgcaatcggtccgagcggacagtgcggcgcaagggtcacgtcataggcttctgccattccggcgattttgtagcattcggtaataccgcccgcgtgggagagatccggttgcagaatcgaaataccacctgcctccagcacgcgtttaaaatcgaagcgtgagaacatgcgttcacccgccgccagtggaatatgcgtttgtgccgccagtttcgggtagtattcggcttgttccgccagcaccggctcctcaataaacagcgggcgatacggctccagttctttaatcagcactttcgccatcggcgcgctgacgcgaccgtggaaatcaagaccaaactcaatctgattgccaaaagcttcacgaatttgtgccacggtgttaaccgccgcatctaccgcgcgggagttatcaattagccccagttcttcacaaccgttcagtttgaaggtatcgaagccgatttcgcgtagcgttttaatgccgtcgataacatccgccggacgatcgccgccaacccaactgtaggctttaattttgtcgcgaaccaggccgcccatcagttgccagaccggcgcattcagcactttacctttgatatcccataacgcctggtcaatcccggcgatggcgctcatcaggatcggaccgccgcgatagaatccggcgcgatacatcacttgccataagtcattgatgcgcgatggatcctgaccaatcaaatagtcacccagctcgtgaactgccgcttccaccgtacgggcgcggccttcgatcacgggctcgccccaaccgaccacgccttcatcggtttcaattttcaggaacatccagcggggaggtaaacgatacgtggtaattttggtgattttcattgcactgcctctcgatacgccttaacaaatgctgctgcctgctgcgcggtgcgctctacggattgcccggcgcgatagagatcgctgcctaagcccgcccctgcacaacctgcgtctatccactgcgccaggttttctggcgtcacgccgccaacggcaaagactgcgatgtccgatggcaataccgcttttaacgctttgatgtattgcggaccaaaagccgatgacggaaatattttcagcgcctgcgcgcccgcttcgagcgcggtaaaggcttcggtcgccgtcgcgcagccggggcagacggtcatgccgtagcccaccgcacggcggatcacttcactatggatattgggcgtaacgatgagctgacagcccatcctggcgagcgcatcgacctgttcaggtttcagtaccgtacctgcgccaatcaacgccttgtcgccgtacgcatcaacgatggcgggaatgctttgctcccattgtggggaattcagcgggatttcaaccgcgtcgaacccggcgtcaatcaccgcgccaacatgcgccagcgcctcgtcgggcgtaataccgcgcaaaatggcgatcagcgggagtttagtttgccactgcatgagcgatgctccttataccagcctgaaatgccgtgtcgcccgccaccgccgtcacgtcgcaacccatcgcctgaaaggcttgctggtagcgcgcggtcagcgatgttccggcgacaagggtgatggcgtgttgatgggccacatagtcgcgcatactggcgacctctgcgccaatcaacaaaccagagagaaattcgctgacctgttcgcggggaagtgttcccagcacatgcgaggcgcgaacttcaaaaagctgcggcaatatggcgggcgtattaagaccacgctcaaggccagctgtgaaggcatcggcagagttttcctgcggcggcaaacctgcgccaatcaatgagtgatttaacagtaaatgatgtaattcaccggtcatcacggtgcgaaaatcgttgatttgctggctatcggcctgcacccatttgcaatgggttccgggcatgacataaagagaggaaggagccagagctcgcgcgccgatcaattgtgtttcttcgccgcgcatcacattgtggttatcgtcatgagagacacataatccgggaataatccagatattgtcgccaactgacgttaattgttcgccaatagacgaaaaacaggcaggaacagataaatacggtgcaactttccagccgacgttgctgccaaccattcctgccattaccactggcgttttctcttcacgccagtcggtcgtgacttctgctaacaccgcagccggagattttccgttcaggcgcgtgacgcctgcttctgattgcctgctctccaggcagtggtcgccctgataaagccaggcgcgcagattggtcgatccccagtcaattgcgatgtagcgagctgtcatgtgatttcctttaaccttcgtgtcgagctggcgatcatggtaagcgccgcctgctctgccgcatcgccgtcctgatgtcgtatcgcatcgaacagcgccttatgttcctggagcgtttgcggcatgttggcctcatcgcccatccaggttcgttcaaaaaccgcccgctgcagcgaactgatcgcaatgctaagttgctgtaacaccgggttatgcaccgactgcagcaccgcctcgtggtagcgaatatccgcttcgttaaacgcttcgcggtcctgattgttggcaatcatctcgttcagcgccgattcaatctgcgccagatcgctggaagtcgcgcgctctgctgcccaacgggcaatcgccggttccaccagatttcgcacttcgctcatggcactgataagccgtgggtcgtagtcattttccagcacccattgcagtacgtcagtgtcgaggtaattccactggttacgcggtgccacaaacgccccgcgataacgtttcatttcaatcagccgcttcgccatcagcgaacggaacacctcacggatgatgttgcgcgaggttgcaaactcctcacagagttccgcctcagccggaagcggcgagcctggcacgtatttgccgtgaacgatctgtttacccagcgtaatgacaatgcgatcggttttattgagagtcatggagagtccttgtgctctgtatgttcttctctactttaccccgatcgatgcataacgcggcaactttgtagtaccagcgtgatgacgttcgcgtttgccgtgcgtgtaatgtagtacaaacttatattgttgtactacaatttagatcacaaaaagaacaatgcataaaaaaatgacatgcgtcgggcagaaatctgaaaagggatatcaggcgctaaacaggagggaaagaagagtatgctttcaacggcttagctactcgtttaaaggattaatcatgaagttgaattttaagggattttttaaggctgccggtttattcccactggcgctgatgctttcaggctgtatctcgtatgctctggtttcccataccgcaaagggtagttcaggaaagtatcaatcgcagtcagacaccatcactgggctatcgcaggcaaaagatagtaatggaacaaaaggctatgtttttgtaggggaatcgctggattaccttatcactgatggtgccgatgacatcgttaagatgctcaatgatccagcacttaaccggcacaatattcaggttgccgatgacgcaagatttgttttaaatgcggggaaaaagaaatttaccggcacaatatcgctttactactactggaataacgaagaagaaaaggcactggcaacgcattatggttttgcctgtggtgttcaacactgtaccaggtcactggaaaacctaaaaggcacaatccatgagaaaaataaaaacatggattactcaaaggtgatggcgttctaccatccatttaaagtgcgattttatgaatactattcacccagaggcattccggatggtgtttccgcagcattactgccagtgactgttacgctggacatcattactgcaccgctgcaatttctggttgtatatgcagtaaaccaataatcagtaagcgggcaaacgcgtttatgctgtttgcccgcccacagattaattcagcacatacttctcaatagcaaacgccacgccatcttcaaggttagatttggtgacaaagttcgccacttctttcactgaaggaatagcgttatccatcgccacaccgacgcctgcatattcaatcattgcgatatcgttttcctgatcgccaatcgccatgatttcttccggtttaatacctaacacgtcggccagtgatttcacccccgtacctttgttaacgcgtttatcgaggatttcgaggaagtacggcgcacttttcagcacggtatatttctctttcacttcctgcggaatacgcgcgatagcctggtcgaggatggcgggttcatcaatcatcatcactttcaggaactgggtattggggtccattttctccgcttcgcagaacaccagcggaatggtggcaacgaaggattcatgcaccgtgtagtagctgatatcacggttggcggtgtacagcgtggtgcggtccagggcgtggaaatgagaaccgacttcgcgagagagtttttccaggaaacgatagtcgtcatagctgagagcagtttgcgccacggtgctaccatcagcggccttctgtaccagcgcgccgttataagtaatgcagtagtcgcccggctgttccatatgcagctctttcaggtagttgtgcacacctgcatacgggcgacccgtcgttagcacgacattcacgccacgggcgcgagctgcggcaatcgcatttttaacggcgggtgaaatggtgtgatcgggcagcagaagggtgccatccatatcgatagcaatgagtttaatagccatgagttccccaggtagattggttcctgacccatgctaacgcgattccgctcaaaaatcagtacaacacccgagggaaaagggggatgcaacgcgcgttgcgtgctccctttttgcttagcggaagagtttccctttcagcagttccatgcctgcggaaagcagatcgttattggcttgtggtgacacttcaccttgcggtgagagcgcatcaataatcttcggcaattgttctgccagtaaactggaagctgtactggtatccacgccaagtttttgcccgagatcggacaccgcatttgtgccgagcgccgattccagttgctcgccactaaccgattgattgccctgttgattactcagccaggttgagagaatggcccctaagccgccactttgcagtttttccagcagcacctgaatgccgccctgctcctcaacccaacttaaaatagcctgatatttccccgcatcgcctttcagaaaggcaccgacaacttcatcaaaaagccccatgataatcacctgtaaagcgttacgtgttgacccaaaaagtatagatttgcgggatgataattgcggattgcagaaataaaaagggcggagatgatctccgcccttttcttatagcttcttgccggatgcggcgtgaacgccttatccggcctacaaaatcatgaaaattcaatacattgcaagattttcgtaggcctgataagcgtagcgcatcaggcacgctcgcatggttagcgccattaaatatcgatattcgccgctttcagggcgttctcttcaataaacgcacggcgcggttcaacggcgtcgcccatcagcgtggtgaacaactggtcggcagcaatcgcatctttaacggtaacgcgcagcatacgacgactttccgggtccatagtggtttcccacagctgttccgggttcatctcgcccagacctttataacgctggatggagaggccgcgacgggactctttcaccagccagtccagcgcctgctcgaagctggctaccggctgacgacgctcgccacgttcgataaacgcatcttcttccagcaagccacgcagtttctcacccagcgtgcagatacgacgatattcgccaccggtgataaactcgtgatccagcggatagtcagtatccacaccgtgggtacgcacgcgaacaatcggctcgaacaggttttgctcagcattggtgtgaacatcaaacttccactggctgccgtgctgttctttgtcgttcagttcgctgaccagcgcgttcacccagcgggtaacggtctgctcatcagaaaggtcagcttccgtcaacgtcggctgatagataagctctttcagcattgctttcggataacgacgctccatacgattgatcattttctgcgtcgcgttgtactcagataccagtttctctaacgcttcgccagccaatgccggtgcactggcgttggtgtgcagcgttgcgccgtccagcgcgatagagatctggtactgatccatcgcttcgtcgtctttaatgtactgttcctgcttgcctttcttcactttgtacagcggcggctgagcgatgtagacgtgaccgcgttcaacgatttccggcatctgacgatagaagaaggtcaacagcagcgtacgaatgtgcgagccgtcgacgtccgcatcggtcatgatgatgatgctgtgataacgcagtttgtccgggttgtactcgtcacgaccgataccacagccaagcgcggtgataagcgtcgccacttcctgagaagagagcatcttatcgaagcgcgctttctcgacgttgaggattttacccttcagcggcagaatcgcctggttcttgcggttacgcccctgcttcgcagagccgcccgcggagtccccttccaccaggtacagttcggaaagcgccggatcgcgttcctggcagtctgccagtttgcccggcaggcccgctaagtcgagcgcacctttacggcgggtcatttcacgcgcgcgacgcgccgcttcacgggcacgggcagcatcgataattttgccaaccacgattttcgcgtcggttgggttttccagcaggtattctgccagcagttcgttcatctgctgttcaaccgccgatttcacctcagaagaaaccagtttgtctttggtctgggaggagaatttcgggtccggcactttcacggaaacgaccgcaatcaggccttcacgcgcatcgtcaccggtggcgctgactttggcttttttgctgtagccttctttgtccatgtaggcgttcagggtacgggtcatcgccgcacggaagcctgccaggtgagtaccgccgtcacgctgcggaatgttgttggtaaagcagtagatgttttcctggaagccatcgttccactgcaacgccacttcgacgccaataccgtctttttcagtggagaagtagaagatattcgggtggatcggcgttttgttcttgttcagatattcaacgaacgccttgatgccgccttcatagtggaagtggtcttctttgccgtcgcgcttgtcgcgcagacgaatggaaacgccggagttgaggaacgacaactcacgcagacgtttcgccagaatttcatattcgaactcggtcacattggtgaaggtttcgaggctgggccagaaacgcaccatggtgccggttttttcagtctcgccggtaaccgccagcggggcctgcggtacaccgtgttcgtagatctgacggtgaattttaccctcgcgctggataaccagctccagtttttgcgacagggcgtttactaccgaaacaccaacgccgtgcagaccgccggacactttataggagttatcgtcaaatttaccgcctgcgtgcagaacggtcatgatcacttccgccgccgatacgccctcttccgggtgaataccggtcggaatgccgcgcccgtcatcctgtacagagacagagttatcggcgtgaatggtgacgataatttctttacagtgacccgcgagcgcttcgtcgatagcgttatctaccacctcgaataccatgtggtgcagaccggtgccgtcatccgtgtcgccgatatacatacccgggcgcttacgcaccgcatccagccctttcaggactttgatactggaggagtcataagaattcgacatcaacgtttctcgctcatttatacttgggttaatccgttattttacccttttccacggtaaacatcttcgaattttcgtccgacatgtctataacgtgttcagcactgatcgcgctgacaaagacctgtgattgcgtcgcttttaagcggctggcaagcagcccgcgacgctcatcatcaagctcagaggcaaaatcatctatcaggtagagacaccgccgcccgctttcacgggtgaggaactctccttgcgccagacgtaaggcgcacatcaacagcttaagctgcccacgcgataaggtatcttccaccggcgcaccgtcggcgcgaatgcgtaagtccgctttgtgcgggccgtgcgcggtgtaggttagctggcgatcgcgttcaaaattacgttccagcacctcagcatattctgtctctttctcccagccgcgctggaaagagaaagtcagagaaaactcagggagaaattgcttacaggtatcagccatatcggccgcgataccggcgctatactccgcgcgccaggtgctgatttgctccgccagcgggatcagctctttatcccacgggcgtagctgttcgtaacgtgtcacctggcgcagcgccgcattgcgctgcttgagcaatcgcttgagattgctccaggcggtgaaaaatccgggttcgttgtgaaagcatccccagtcgaggaatgctcttctgtatttggggccgccgttgagtaaagtaaacccttctggcgttatcaactgcattggcatcaggtgcgccagttccgcgaccttatgcccgtctgtaccgtcgatgcggactttgctgtcgccctgtttgtctttggttaagccaatcgctgtctcgcgctcttcgccctgtaatcgcccgtggagaacaaacgcctcctgctcatggcgaatgacgcgaccaatctgcaaactgcgaaacgcccgaccatggccgagcgtatagatggcttccagcacgctggttttgccactgccgttggcacctaccagaaagttaaagccgggagataaggcgagatccgcggtttcaatgttgcggaaatcgcggatcaacaagcgggtgagggacattacagtctcattggcatgacaacataagccgcgctctggctggccgcatcttcaatctgcacgctggaaaccgaatcggtcagcatcatgcggacgttttcgcatttcagcgcgttcagaacatccagcacataactgacgttgaagccgatttccatctccgcaccgctataggtaacgtcgaggatctcttccgcttcttcctgttccgggttgttggcggtgattttcagctggttttcgctgacataaagacgtacgccgcggaatttctcgttagagagaatcgccgcgcgagcaaacgcctgcttgagcagatcgcagccagcttccagatgtttgtccgggttcttcggcagaacgcggcgataatccgggaagcgaccatccaccagtttggaggtgaagataaagtcgccaacgtgggcgcgaatgttgttgctgccaatctgtacgcgcagcggattgtcgccgccgtcgagcatacgcatcagttcaatcacgcctttacgcggtacgatcaccgaatggcttggcaaagattgaccaattggcattgaacagaccgccagacggtggccgtcggttgccacggtgcgcagttcttcaccttcggtttcaaacagcataccatttaagtaatagcgaacgtcctgatgcgccatagaaaactgggtcgcttcaatcagacgcttcatcgttgcctgcggcagggtaaattcgacttcactctgccagtcatcgaggttcgggaaatccgccgctggcagggtagacagcgaaaaacggctacgcccggagcgtaccagcatccgttcaccttccagctgcacggcaatttccgcgccttcaggcagaccacggcagatatcaaagaatttgcgcgccggaacggtcgtcgctcctggctcgtgtggctgaaccagcgcaacacgtgccaccatttccatctcgagatcagtaccggtcagcgacaacgtaccgtcagcaacctgtaacagcagattaccgagaatcggtagcgtaggacgaccacctaacggaccgctcacctgttgtagcggttttaataaatgctcacgttctacggtaaatttcataggtttacgatgacaatgttctgattaaatttgaaaaatcttctttgatatcgtggctctcttcacgcaactgctcgatcttacggcaggcatgaagcaccgtcgtgtggtcacggccaccaaacgcatcgccaatctccggcagactgtggttagtcagctctttcgccagcgccatcgccatctggcgcggacgcgccaccgagcgggatcgacgcttggaaaggagatccgcgactttgatcttgtagtactccgccaccgtcttctgaatattgtcgatggtgaccagtttttcctgcaatgccagcaagtcgcgcagcgcctcacgcacgaagtcgatggtgatcgcccgtccggtaaagttggcattggcaatgacgcggttcagcgccccttccagctcacgtacgttagatcgtagacgcttggcgataaagaacgccacttcgcccggcaaacgaatgtcgttttcgtcggcctttttcatcaggatcgccacacgggtttccagctctggcggttcgatcgccacagtcagtccccaaccgaagcgggatttcaaacgatcctcaacgccgttgatctctttcggatagcgatccgaggtgagaatgatctgttgattaccttccagcagggcgttgaaggtgtggaaaaactcttcctgagatcgttctttattagcaaaaaactgaatatcgtcgatcagcagtgcatctacggaacggtagtagcgtttaaactcttcgatcgcgttgttttgcagggctttaaccatgtcctgaacaaagcgctcggagtgcatataaaccactttggcattcggcttgcgcgccataatgccgttacccaccgcatgcagcaggtgagttttacccagacccgtgccgccataaaggaacaacgggttataggcaccgccagggttatccgccacctggcgagccgccgcgcgcgccagttggttagatttaccttcaacgaagttatcaaacgtgtgtttgacgtttacgttagaacgataggtcggttctgccggggccgggacgttatcccaacctgagcgcgtagaaggcgcagcacgttgcggctgcgtttgcgccacctgtgcaggggccgcgacgttgctcgtcactgccgcttgtggcgtttgcgtcaccggtttggtgccgacttcaaaacgcagctgtggggcatccgctccgcagaaactggttagcagtccattgatattattaaggtacttgtcccgtacccaatcgaggacaaaacggtttggcgcgtacagggccagcgtgttatcgctcagttccgcctgcaatgggcgtatccacatactgaattctgtggctggtaactcatcctgcaatcgggcaagacactgctgccaaagcgaaagtgacacggcggactccactcgaacaaaagtcgataatgactaaggctgaaacattcatgattgttgacgtacgtcgaaaagaccctgcttgagggtgacgcacgaaccgctgtctgcggttatatgcccgatcaagatcctgcaaaacgatcgggaccgcggatcatagcctaaactgcgcaagagatcttctgtttctcacagattttcccgatttatccacaggactttccagaactcgctaagtgtaaacgatcctgccgcgaggcgggcacgatttacgccgcatattggaaaatttaatgaccatagacaaaaattggcttaatcgatctaataaagatccaggacgatccttgcgctttacccatcagcccgtataatcctccacccggcgcgccatgctggtttccactggtgtgaggtcgtacattttccctgcgaaaaggtgcggaaaagcgcggtaaataaggaaagagaattgactccggagtgtacaattattacaatccggcctctttaatcacccatggcttcggtgtccatcgtttcatttttcggcggatatccaataaagccattgaatttattcaagtttaggtagaaatcgccatgaaacgcacttttcaaccgtctgtactgaagcgcaaccgttctcacggcttccgtgctcgtatggctactaaaaatggtcgtcaggttctggcacgtcgtcgtgctaaaggccgcgctcgtctgaccgtttctaagtaataaagctaacccctgagtggttaagctcgcatttcccagggagttacgcttgttaactcccagtcaattcacattcgtcttccagcagccacaacgggctggcacgccgcaaattaccattctcggccgcctgaattcgctggggcatccccgtatcggtcttacagtcgccaagaaaaacgttcgacgcgcccatgaacgcaatcggattaaacgtctgacgcgtgaaagcttccgtctgcgccaacatgaactcccggctatggatttcgtggtggtggcgaaaaaaggggttgccgacctcgataaccgtgctctctcggaagcgttggaaaaattatggcgccgccactgtcgcctggctcgcgggtcctgatagccctcattcgggtctatcaacgcctgattagtccgctactcgggccgcattgtcgtttcactccaacctgttcaagctacggaattgaggcattgcgcaggtttggagtgataaaaggcagttggttgacggtgaaacgcgtattaaaatgccaccctttacaccctggtggtgacgatcccgtcccgcccggaccatttgataccagagaacactaacgatggattcgcaacgcaatcttttagtcatcgctttgctgttcgtgtctttcatgatctggcaagcctgggagcaggataaaaacccgcaacctcaggcccaacagaccacgcagacaacgaccaccgcagcgggtagcgccgccgaccagggcgtaccggccagtggccaggggaaactgatctcggttaagaccgacgtgcttgatctgaccatcaacacccgtggtggtgatgttgagcaagctctgctgcctgcttacccgaaagagctgaactctacccagccgttccagctgttggaaacttcaccgcagtttatttatcaggcacagagcggtctgaccggtcgtgatggcccggataacccggctaacggcccgcgtccgctgtataacgttgaaaaagacgcttatgtgctggctgaaggtcaaaacgaactgcaggtgccgatgacgtataccgacgcggcaggcaacacgtttaccaaaacgtttgtcctgaaacgtggtgattacgctgtcaacgtcaactacaacgtgcagaacgctggcgagaaaccgctggaaatctcctcgtttggtcagttgaagcaatccatcactctgccaccgcatctcgataccggaagcagcaacttcgcactgcacaccttccgtggcgcggcgtactccacgcctgacgagaagtatgagaaatacaagttcgataccattgccgataacgaaaacctgaacatctcttcgaaaggtggttgggtggcgatgctgcaacagtatttcgcgacggcgtggatcccgcataacgacggtaccaacaacttctataccgctaatctgggtaacggcatcgccgctatcggctataaatctcagccggtactggttcagcctggtcagactggcgcgatgaacagcaccctgtgggttggcccggaaatccaggacaaaatggcagctgttgctccgcacctggatctgaccgttgattacggttggttgtggttcatctctcagccgctgttcaaactgctgaaatggatccatagctttgtgggtaactggggcttctccattatcatcatcacctttatcgttcgtggcatcatgtacccgctgaccaaagcgcagtacacctccatggcgaagatgcgtatgttgcagccgaagattcaggcaatgcgtgagcgtctgggcgatgacaaacagcgtatcagccaggaaatgatggcgctgtacaaagctgagaaggttaacccgctgggcggctgcttcccgctgctgatccagatgccaatcttcctggcgttgtactacatgctgatgggttccgttgaactgcgtcaggcaccgtttgcactgtggatccacgacctgtcggcacaggacccgtactacatcctgccgatcctgatgggcgtaacgatgttcttcattcagaagatgtcgccgaccacagtgaccgacccgatgcagcagaagatcatgacctttatgccggtcatcttcaccgtgttcttcctgtggttcccgtcaggtctggtgctgtactatatcgtcagcaacctggtaaccattattcagcagcagctgatttaccgtggtctggaaaaacgtggcctgcatagccgcgagaagaaaaaatcctgattcggtgagttttcgctaaaataagggcggtcagttgaccgccttttttcttttcgtagggcggataagcaccgcgcatccgccacacaaagcaacaggaacatcatgagcgataatgacactatcgtagcccaggccacgcctccgggacgtggcggcgttggcatcctgcgcatctccggcttcaaagcccgtgaagttgccgaaaccgtgctgggtaaactgcctaagccgcgctacgccgattatcttccgtttaaagacgccgacggcagcgtgctcgatcaggggattgcgctatggttccctggcccgaactcgttcaccggcgaagatgtgctggaactgcaaggtcatggcggtccggtgatcctcgacctgctgttaaaacgcattctgaccattcccggcctgcggattgctcgccctggtgagttttccgaacgcgcgtttcttaacgataaacttgacttagcccaggccgaggcgattgccgatcttatcgacgccagttcggaacaggcggcccgttcggcacttaactcgctgcaaggcgcattctccgcacgggttaatcatctggtagaagccctcacccacttgcgcatttacgtcgaagcggcaattgatttccccgatgaagagatcgatttcctctccgacggaaaaattgaagcccagctcaatgacgttattgccgatcttgatgcagtgcgtgctgaagcacgtcagggtagtttgttgcgcgaagggatgaaagtggtgattgccggacgtcctaacgccggtaaatcgagcctgttaaacgcgctggcggggcgtgaagcggcaatcgtaaccgatatcgccggaactacgcgtgacgtgctgcgtgagcatatccacattgacggaatgccgctgcatatcatcgataccgccgggctacgtgaagccagtgacgaagtagaacgtattggtatcgagcgcgcgtggcaggaaattgaacaggccgaccgcgtgctgtttatggtcgatggcaccacaacagacgccgtggatccggcagagatctggccggaatttattgcccgtctgccagcgaaactgccgatcaccgtggtgcgcaataaagccgatatcaccggcgaaacgctgggaatgagtgaagtgaacggtcacgcgttaattcgtctctcggcaaggactggtgaaggcgtggacgtgctgcgtaaccatctcaaacagagcatgggctttgacaccaacatggaaggcggcttcctggcgcgtcgtcgccacctacaggcgctggaacaggcagcggaacatctacaacagggcaaagcgcaactgttgggagcctgggcaggtgaactgctggcggaagagttgcgtctggcacagcagaacttaagcgaaatcaccggggaatttacttcagacgacctgctggggcggattttctccagcttctgtattggtaagtaaccgcgcttacgaagccgcattctgactgtcagatgcggcttcgcttcattgttaccactcctgttattcctcaaccctttttttaaacattaaaattcttacgtaatttataatctttaaaaaaagcatttaatattgctccccgaacgattgtgattcgattcacatttaaacaatttcagaatagacaaaaactctgagtgtaataatgtagcctcgtgtcttgcgaggataagtgcattatgaatatcttacatatatgtgtgacctcaaaatggttcaatattgacaacaaaattgtcgatcaccgcccttgatttgcccttctgtagccatcaccagagccaaaccgattagattcaatgtgatctatttgtttgctatatcttaattttgccttttgcaaaggtcatctctcgtttatttacttgttttagtaaatgatggtgcttgcatatatatctggcgaattaatcggtatagcagatgtaatattcacagggatcactgtaattaaaataaatgaaggattatgtaatggaaaactttaaacatctccctgaaccgttccgcattcgtgttattgagccagtaaaacgtaccactcgcgcttatcgtgaagaggcaattattaaatccggtatgaacccgttcctgctggatagcgaagatgtttttatcgatttactgaccgacagcggcaccggggcggtgacgcagagcatgcaggctgcgatgatgcgcggcgacgaagcctacagcggcagtcgtagctactatgcgttagccgagtcagtgaaaaatatctttggttatcaatacaccattccgactcaccagggccgtggcgcagagcaaatctatattccggtactgattaaaaaacgcgagcaggaaaaaggcctggatcgcagcaaaatggtggcgttctctaactatttctttgataccacgcagggccatagccagatcaacggctgtaccgtgcgtaacgtctatatcaaagaagccttcgatacgggcgtgcgttacgactttaaaggcaactttgaccttgagggattagaacgcggtattgaagaagttggtccgaataacgtgccgtatatcgttgcaaccatcaccagtaactctgcaggtggtcagccggtttcactggcaaacttaaaagcgatgtacagcatcgcgaagaaatacgatattccggtggtaatggactccgcgcgctttgctgaaaacgcctatttcatcaagcagcgtgaagcagaatacaaagactggaccatcgagcagatcacccgcgaaacctacaaatatgccgatatgctggcgatgtccgccaagaaagatgcgatggtgccgatgggcggcctgctgtgcatgaaagacgacagcttctttgatgtgtacaccgagtgcagaaccctttgcgtggtgcaggaaggcttcccgacatatggcggcctggaaggcggcgcgatggagcgtctggcggtaggtctgtatgacggcatgaatctcgactggctggcttatcgtatcgcgcaggtacagtatctggtcgatggtctggaagagattggcgttgtctgccagcaggcgggcggtcacgcggcattcgttgatgccggtaaactgttgccgcatatcccggcagaccagttcccggcacaggcgctggcctgcgagctgtataaagtcgccggtatccgtgcggtagaaattggctctttcctgttaggccgcgatccgaaaaccggtaaacaactgccatgcccggctgaactgctgcgtttaaccattccgcgcgcaacatatactcaaacacatatggacttcattattgaagcctttaaacatgtgaaagagaacgcggcgaatattaaaggattaacctttacgtacgaaccgaaagtattgcgtcacttcaccgcaaaacttaaagaagtttaattaatactacagagtggctataaggatgttagccactctcttaccctacatcctcaataacaaaaatagccttcctctaaaggtggcatcatgactgatcaagctgaaaaaaagcactctgcattttggggtgttatggttatagcaggtacagtaattggtggaggtatgtttgctttacctgttgatcttgccggtgcctggtttttctggggtgcctttatccttatcattgcctggttttcaatgcttcattccgggttattgttattagaagcaaatttaaattatcccgtcggctccagttttaacaccatcaccaaagatttaatcggtaacacctggaacattatcagcggtattaccgttgccttcgttctctatatcctcacttatgcctatatctctgctaatggtgcgatcattagtgaaacgatatcaatgaatttgggttatcacgctaatccacgtattgtcgggatctgcacagccattttcgttgccagcgtattgtggttaagttcgttagccgccagtcgtattacctcattgttcctcgggctgaagattatctcctttgtgatcgtgtttggttcttttttcttccaggtcgattactccattctgcgcgacgccaccagctccactgcgggaacgtcttacttcccgtatatctttatggctttgccggtgtgtctggcgtcatttggtttccacggcaatattcccagcctgattatttgctatggaaaacgcaaagataagttaatcaaaagcgtggtatttggttcgctgctggcgctggtgatttatctcttctggctctattgcaccatggggaatattccgcgagaaagctttaaggcgattatctcctcaggcggcaacgttgattcgctggtgaaatcgttcctcggcaccaaacagcacggcattatcgagttttgcctgctggtgttctctaacttagctgttgccagttcgttctttggtgtcacgctggggttgttcgattatctggcggacctgtttaagattgataactcccacggcgggcgtttcaaaaccgtgctgttaaccttcctgccacctgcgttgttgtatctgatcttcccgaacggctttatttacgggatcggcggtgccgggctgtgcgccaccatctgggcggtcattattcccgcagtgcttgcaatcaaagctcgcaagaagtttcccaatcagatgttcacggtctggggcggcaatcttattccggcgattgtcattctctttggtataaccgtgattttgtgctggttcggcaacgtctttaacgtgttacctaaatttggctaaatccttcaagaagccagccattcgctggcttcttgcctctcaggaaatcacttatgtccaaatggcaactcgcctgatcctccttcaccacgtatgctttgcgtcaccttactatcaggacgctttagcccatgtcccgctttttgatttgtagttttctggttttactttatcccgccaattaataataatacctcgttggtttaccgcgcatcgccgccgatctcaatgccagcgaagcgcagttgcatattgcgttctccgtatatctggcggggatggcagctgcgatgttatttgccggtaaagtggccgatcgttcagggagaaagccggtcgccatacccggcgcggcgctatttattattgcctcggtgttctgttcactggctgaaaccagcacgttatttcttgcaggccgatttctacaggggttgggcgcaggctgttgttacgtagtggcgttcgctattttgcgcgacacgctggatgatcgacgtcgggctaaagtgctgtcattactcaacggtattacctgcatcattccggtgttagcgccagtgctcggacatctgattatgcttaaattcccgtggcagagtctgttctgggcgatggcaatgatgggcatcgcggtactgatgttgtctttgtttattttaaaagaaacgcgcccagcggcccccgcagcttcggataaaccacgagaaaatagcgagtcgctgcttaaccgttttttcctcagccgtgttgttatcaccaccctcagcgtttcggtgatcctcactttcgtcaacacgtcaccggtattgctgatggaaatcatggggtttgagcgcggtgaatacgccaccattatggcgctgaccgctggcgtcagcatgaccgtttcattctccacgccatttgcgctgggaatttttaagccacgtacgttgatgatcacctcgcaggtgttattcctggcggcggggatcactcttgccgtttcaccttcccatgcggtttctctgtttggtatcacgctgatttgcgccggtttctcggtaggttttggtgtggcgatgagtcaggcgttagggccgttttcattacgcgcgggcgtagccagctcgaccttaggtattgcgcaggtttgcggttcgtcactgtggatttggctggcagcggtggttggtatcggcgcatggaatatgctgatcgggattctgattgcctgtagcatagtgagcctgttgctgattatgttcgtcgcgcctggacgccccgttgccgctcatgaagaaatccatcaccacgcttgatctcaatctgctgctttgtctgcaactgctgatgcaggagcgcagcgtaaccaaagcggcgaagcggataaacgtgacaccttcggcggtgagtaagtcgctggcaaagttaagagcgtggtttgacgacccgctctttgtgaactcaccgctgggtctgtcgcccacaccgctgatggtcagcatggagcaaaatctggcggagtggatgcaaatgagcaacctgctgctggataaaccgcaccaccagacaccgcgcggcctgaagtttgagctggcggcggaatcaccgctgatgatgatcatgcttaatgcgctgtcgaaacagatctaccaacgttacccgcaggcgaccatcaaattacgtaactgggattacgattccttagatgccattactcgtggtgaagtggatatcggtttttccggtcgcgaaagccatcctcgctcgcgggagctgttaagctcgctaccgttagccattgattatgaagtgctgtttagtgatgtgccctgcgtctggttacgcaaagatcatccggcactgcatcaaacgtggaatctggacaccttcttacgttatccgcatatcagcatttgctgggaacagagcgatacctgggcgctggacaatgtgttacaggagctgggacgcgaacgcacgattgctatgagcctgccggaattcgagcagtcactgtttatggcagcgcaacccgacaatctgctactggcgaccgcgccgcgctactgtcagtactacaatcaactccatcaactgccgttggttgctcttcctctcccgtttgacgaaagccagcaaaaaaagctggaagttccttttaccctgctgtggcataaacggaacagccataatccgaagatcgtctggttacgggaaaccattaaaaacctttacgcgtcgatggcataaccgaatcgtatgaaacgcgacccaatttcacaataaaatgtaaaaaagttgtaataagcttgtctgaatcgaacttttagccgctttagtctgtccatcattccagtaaatgattactcttgtattcataatggaccattaagcatggagcgaaaaatggcgactcactttgcccgagggattttaacggaaggacatctgatttctgttcgtctcccctcccagtgtcatcaagaagcccgaaacattccccctcatcgtcaaagccgttttctggcgtccagaggtttactcgcagaactgatgttcatgctgtatggcattggcgaattgccggaaatcgtcaccctgccgaaaggtaaaccggttttcagtgataaaaatttgccttcgttttccatttcctatgccgggaatatggttggcgtggcgttaacaaccgaaggtgaatgtggcctcgatatggaactacagcgtgcgacgcgcgggtttcatagcccacacgcgcccgataaccacaccttttccagcaatgaatcgctatggatcagtaaacaaaacgatcctaacgaagcgcgggcgcagctcatcacgctgcgccgaagcgtgctaaaactaaccggtgatgttttgaatgacgatccgcgcgatctgcagctgctgcccattgccggacgcctgaaatgtgctcatgtaaatcatgtagaagcgttatgcgacgcggaagacgtgctggtgtggtccgtggcggtcacgcccacgattgaaaagctcagtgtctgggagttagatggcaaacacggctggaaaagcctgccggatattcacagccgcgccaacaatcctaccagccggatgatgcgttttgcccaactctctaccgtgaaggctttttcgccaaattgatagacaaccacaggagtcatcatgtctgaaaaattgcaggtggttacgttactggggagcctgcgcaaaggctcatttaatggcatggttgcacgtaccctgccgaaaattgctccggcgagcatggaagtcaatgcgttaccatccattgccgacattcccttgtatgacgctgacgtacagcaggaagaaggttttccagcaacggttgaagctctggcggaacagatccgtcaggctgacggtgtggtgatcgtcacgccggaatataactactcggtaccgggtgggctgaaaaatgccatcgactggctttcccgcctgccggatcaaccgctggccggtaaaccggtattgattcagaccagctcaatgggcgtgattggcggcgcgcgctgtcagtatcacctgcgccagattctggttttcctcgatgcaatggtgatgaacaagccggaatttatgggcggcgtgattcagaacaaagttgatccgcaaaccggagaagtgattgatcagggtacgctggaccacctgaccgggcaattgaccgcatttggtgagtttattcagcgagttaagatctaaataaaaaacccgccagcaatcatgcatggcgggtttttaacgcgctatcgattttagtgagcgtcgataaagacaatcttcaggataaacagcagcgcaacgatgattacgcacgggcttagatcacgcagacgtccggtaccgattttcatcacgcagtaggagataaagcccagcgcgataccttcggtaatcgagaagctgaacggcatcatcacggcggtaataaacgccggaacagattcagtaagatcctgccagttcacgcgtgccagactggaagtcatcagcacgccaacgtaaatcagcgcaccagctgcagcgtagcctggcaccatccccgccagcggcgacagaaagataaccagcaggaacagcagaccaacaaccactgccgtcagaccggtacgaccgccaaccgatacgccggaagaggactcaatataagccgtaacggaagaagtaccgataaacgaaccggtcacggaagagatactgtcgacatacagcgcctgcttcatgcgcgggaatttccccttctcatccgccagacctgctttatcggtcacgccaatcagcgtaccggaggagtcaaacaagttgaccaacatgaaagagaaaatcacccctgccagcccgaggttaaacgacccggctaaatctacatgacccacaactgtcattacgctcggcggcgcagaaacgatgccattgtagtgcacatcacccagcatccagcccagcagcgtcgtcaccacgatagaaaccagcaccgctgcgtgaatgttgcgcgaggccagaatagcaatgatgaagaagccgaggatacccagaagtacgctgtgagaagtcagattaccgatgctcaccagcgtttccgggttagcgacaatcacacctgcgtttttcagccccatcatgccaatgaacagaccgataccgctggtaatacccacacgcagactcaccggaatgttggctatcatccagtagcgaacgcggaaaatcgtcagtaacagcagacctatcgcgccccagaagattgcgcccatcccgacctgccacggcaagcccatcgcctgtacaacgacaaaagcgaagaacgcattcaggcccatagcgggtgccagtgcaactggcaggttagcaaacagtcccatcataatactgccgaatgcagcgatcagacaggtagtgacgaagacggcgctggtatccatgccagcaacgccaagaatttgcgggttaacaaaaacgatgtaaaccatcgtcaggaaggtggtaaaaccggcgatcacttcggtccgtgccgtcgtgccatgttcgcgcagtttaaacacgcgttccagcatcccctgaccagaagtctgggtggtatgttgatgactcattatctatttccgaacaaggagggaaaatccgtcgctatcgtataccaaaatgcgacaataggcgcgtttgtgagagacttttttattggatttacttatacggcaacgattgcgttgcgcaaatcggctctacgaaaacgttaaactgattaaaaaggaaaggcatgtcccggatagaagcggtatttttcgactgcgacggtacgctggtcgacagtgaagtcatttgctctcgcgcatatgtaacgatgtttcaggaatttggtattacgctcgatcctgaagaggtattcaaacgtttcaaaggtgtaaaactgtacgaaattatcgatattgtttcccttgaacatggtgttacgttagcgaaaacagaagctgaacacgtttaccgtgcagaagtcgctcggctgttcgattcagaactggaagccatcgaaggggctggagcgctcctgtcagcgatcactgcgccaatgtgtgtggtatctaacggcccaaataacaaaatgcagcattctatgggcaagctgaatatgttgcactacttcccggataaactgttcagcggctacgatattcagcgctggaagccagacccggcgttaatgttccatgcggcaaaagcgatgaatgtaaatgtagaaaactgcattctggttgatgactcagttgccggtgcacaatctggtatcgacgcaggtatggaagtgttctacttctgcgccgacccgcacaataagccgatcgttcacccgaaagtcaccacctttacccatctttcgcagttacctgaactgtggaaagcgcgtggttgggatattacggcatagttcttcacactcccttcacttaccccgcttaaattggcgctcaaaggtaagtaaagggagtttgatatgtctgtttcacgtcgggtaatacatcacggactttattttgcagttttaggaccgttaattggtgttctgtttcttgtcctctacatattcttcgcaaaagaaccgctggttctttgggtgataatacatccaatttttctcttattgtcgataactacgggagctattcctgcgttgttaaccggtgtaatggttgcctgtctgccggaaaagatcgggtcacagaaacgttatcgttgtctggctggtggcataggtggcgtcgttatcaccgagatctattgtgcagttattgtacatattaagggcatggcttcctcggagttgtttgaaaacattctttctggtgacagtctcgttgtccgcatcattcctgcattgctggcaggtgtggtgatgagcagaatcattacccgtctacccggattggatatttcatgtcctgaaacagactctttaagttaagcgggatactttatctttgggctactcaaaagcagacaggatgtttctatgactcaaaatatcaggccgttaccccaattcaaatatcatcccaagccactggaaacaggcgcatttgaacaggataaaaccgtagagtgcgattgctgtgaacaacagacgtcagtttattactcgggtcccttttattgcgttgatgaagttgaacatctctgtccgtggtgtattgcggacggttctgctgctgaaaagtttgcaggtagttttcaggatgatgccagcatagaaggtgttgaatttgagtatgatgaagaggacgaatttgccggtattaagaacacatatcctgatgaaatgctgaaagagttggttgaacgcacgccaggttatcatggatggcagcaggaattctggctcgcgcattgtggcgatttctgtgtttttatcggctatgtgggctggaatgatataaaagatcgcctcgatgaatttgccaaccttgaagaagattgtgagaatttcggtattagaaattctgatctagctaaatgcctgcaaaagggtggtcattgtcagggttatctcttccgctgtctccactgcggcaagctgagactgtggggtgatttttcgtagttatttaaataatgagaacaggccggagcgtaattcacacatccggccttatttcttaagcttaaccgagtgctaattctgcggcagcggctttatcagcgattaccatcagcgaaggatgcagctgcaacacggaagctggaacatcttcggtaaccggaccttgcagaacatttttcagtgcctgcgctttacccgcgccgctgacaattatcagcaagtttttcgccgccatgatgcttttcggccccatcgtcacgtagctgtcaggcactaacgaaaagtcgccgcccaactcgccatgcgccacaatatcaaccatctctccctggatcgggaactccacggtttgctcatggaaatgggtcgtattcggcaaattgccacaaaaatgaccatctgcacctaatcccagcaccaccaaatccagtccgccttcacgcgccagtttctgatcatgctcgcggtagttatcaatagtgagcttctggatattctcttctttgatccccgcaggggtgaaaaacagattacgcagattggtaatcgttacgccttctccctctttgccgcgaaatggaatttcatcaaaattatagaaatagcagttatcgtaccagggcttacctttaaccagggtggtgaggtattcatacatgcctttgggcgtgctaccggcggtaattgccaggttaacacgacgcgtcttcgacatataaccaagcagatggtgtgccgcgacacggctcatttcctggtaatcttcggtaatgattaatttcatcttaatgccttattttatttaaataatttctgtacaaaggctgcataggctggtcgccagacatccatttcatggttcagacccggatattcctggtaatcaaagttaatttttttctgctcaagctcagttttcagcccggcgatatccttgccggttacgacatctttatcccccacaaccacagtaaaattacgtagttgctggttgatagctgccggatcgttcagtcgggccgcgacaccttcatccggtacggttgtcgtggtaacaccactgaatgtggccagccagccaaagctttccagatgattcattccggaaaccagcgcctggtacccgccttgtgaaagccctgccagcgcgcggccatcggcatctttacggacattaaaacgcttgctaatcagcgggataatatcgttcatcagttcgcgatctgccgctttagcattcagcggataaaagactttacgtctttcctgaggcacgaaatcttcgggaataatgcccttcgcatcggtttctgtatccgggatcaccaccagcatcggtttaattttcccttcagcaagcaggttatccatgatttgcgggatacgcccctgatcgatagcggaacgtccggtatcaccaaagccgtgatagaaatagagcactggcaaaggctcgcccatgccggtgtatcctggcggggtccagacatacatctgacgttcagattgcaatgcgttggagtggtaagttatggcgatcaaatcaccatgcgcaacagaacgcgtatccagataactgcctggcaccagaatcatactggagttaacctggcgctgaggattagtcattgcggtgcctgtatcaatgctgcgtacaccatcaacattgaaaaaatactcgtacaggttgcctttcaggataggtgtgcgccacgaccagactcctgcttcgtctttggtcatcgggtgaatattgtccggaaccggaacacccaccactacagagacattttttgccccaggggcaaagtagcgaaaggtcacgctgttatcggcattgacctgagtcacatactgtttcaccgggatagtgggtgccgggctggctggcatatccgctgctatggcccactgagcagaaataccgctggcaatagccagcgttaaagcagcaatttttatattcatcgtaatattcctttcattaagttccattaccaccagatttcagcctgggcaccgacagcaaactggtcgtctttattgtcttcaaaggtgaagccatccagttcgttttccagggctttgatatacgtggcgtagaaacgaatttccggacgcgaggtcaacatactggtattgactttaaaggtatggaagagcgtggttttataaccagactcattaaatttattactattcgcatctttgttttgctgggtgaaatagcccagttcaacacctgtctggttatattggtcccaaatataggccgggcgaacaaccgcacgaatagattcgaaatcagagtgggcgcctgtttcgtagctatatatatcgttaccgaaggagtaaacaatcgcgttagctacaatgaaatgatcgccaatataggcttcgccctgcgaagtcagacgtaccgctgttccgccggtgtgatcaccataataacgaccattaaaggtggtaaatggacttgcgccagcataacggccaaagttactggcgatagagttattcgcgaccaggaaggagaattcgttgaagccacctttatcaaatttctgcgttaaagatgtgccaaacatccaggtatctttccagtcataatacccgttattatcctgattatctttttccgatgcgctttcgtttgccgtgacataacgaccacttaccattaaggtggctttatcccataacgggatatctttatagcgtaaatcaatggtattggtattaatctgctgtttgttttgcaggctgcgatcgtaatcatcgacatcttcgcgaaccagcgcgatatcaattttacccggaccgactttccagttttccagacctacacccgctgcggcatcagtacgctgcgttttccagtcaagcatctggatttcaattttcggcgcaccgtgtttacccacccagaaatcagcctctggcgcaaagggcaggaaacctttggtggtaacgtacatatcggagaactgcatatagttctcgccaccggcgttatcgccaaaccagccggtagagtactgctgaccaacgttaccatccatcatcacaacggcatcaacccgtttgccgttttcgttgtagacacgttgttttaactgcaaatcaaaccagccggagtattcgttaccaaagcggcccagagaaccaatcgcccatgatttaggtgaaccatgagaggcggtcccccaaccagaacggtaatagccgttgtaactaaagccaatttcatctttcacaaatttactgaaatctttcagagtcatggaagaataaatcgagcctgtctcactggcatttttctcttcatttttgaccagtacagcatcaggttttgcggcactactggtcgggaacggattggcggcatacccttgatcattcgtacttacgctacgattcaccgtcgctggcgtatactttttcttctcttcatctttatactttttgagttcgctttgcgtttctcttaacgccttttctaataactcaaggcgttgttccaccgttaatgattcagccaatgattgtgcagaaaaggctaacggtgccattaataagatggcagaggtaataagatttcgtctaaacataatatccctttatggtgcaaagaaagaattaacgcatcgcatccagactgttctgaatgcgacgataattaaggtgctttaatggttattttttttaatgacagcccccgcgtcttgatcacctctgcataccatccgaagcttttcttgcgtgttcttgtgaggcttccttcgccattatcatcacgatccacataaataaagccgtagcgcttagacatttgtgaatgagatgcactgactaaatcaattggcccccaactggtgtaccccataatatccacaccatcggcaatcgcttcatttacctgtaccaggtgatcgtttaaataggcaattcgataatcgtcctgtatcgaaccatccgcttcaacgctgtcttttgcgcctaatccgttctcgacaataaataacggtttttgataacgatcccaaagcgtatttaacagaacccgtaatccaaccggatcaatttgccacccccactctgaacttttcagatgcggattggggatcatattcagtatgttgccctgcgcatttttattaatgctttcgtcgtgggaaacacaaccagtcatgtaataactaaaagagatgaaatcgacggtatgttttaaatcttctgcgtcactttcagtcatctcaatggtgatattgtggtcgcggaagaaacgctgcatatagccgggatactggccacgcgcctgaacatcaccaaagaacatccagcgccggttctcttccatggcctgcaacatatcctgtggctggcaggtgagggggtaaaccagcccaccgagaagcatattgccgattttcgcttcggggagcaggctatgacaggctttaactgcccgcgcactggcaaccagttgatggtggatagcctgataaacttccgcctcgccactctcttctgccagccccacgcccgtgaatggcgcgtgtaacgacatgttgatttcattaaacgtcagccataacgccactttatgttggtagcgagtaaagaccgtgcgggcgtaatgctcgaagtgatcgatgaccgctcgattagcccaaccgccgtagtttttcaccagcccatatggcatttcgtaatgggataacgttaccagcggcttgatccccgcctgcgccatttcatcaaacagccgatcgtaaaacgctaaccccgcttcattcggttcgacttcgtcgccctgagggaaaattcgcgcccaggcaatggaaatacgcagacaggtgaagcccatctcggcaaataacgcgatatcttccgggtaacggtgataaaaatcgatggcgacatctttgatattctctttccccaggatgcgcggttccatttttcccattacgccatgaggctgtaaatctgaggtcgagatccctttgccatcttcctgccaggcaccttccacctgattggcagctgttgcgccaccccaaagaaatgtttctggaaatgctttcataattaactccttttatcgttagcgaatgatggataacagcggttcacctgcgcttatctgcgccgtgccgtggggtaatacgtccgtaaaatcatcgctattactgattaataccggcgtcgtcagatcaaatccggcctcgcgaatagcagggatatcaaaagaaatcagccgatcgcctgtattgaccttgtcacccacgttgacgtgagcggaaaagaatttgccgtccagttttacggtgtcgataccgacatgaatcaggatctccacaccatcatctgactcaatgccaatggcgtgtaatgtggcgaacaacgaagcaattcgacccgcaaccggagaacgcacttcaccaaccgagggcagaatggcaatacctttacccaacaggccactggcaaacgtggtatcagcgacgtgaatgagcggcacaatctctcccgtcatcggtgaacagataccgccctgctcaggtggtgtaataacctctggtgttttctcttgcggggcaccctgcgctggctgacgtttagcggtgatgaaatgaagcatcaccgtaccgacaaatgcgcaaccgatggcaatgacaccgccaataacgctggcccagacggtgaaatcaattcccgttgacgggatggtttgcatgaaggtgaaaatacttggcaaaccaaaggagtagactttcgtttgcgcgtagccaataatggtggcccccaaagccccactgatacaggcgataacaaaggggtacttacgcggcaggttgacgccatataccgctggttcggtgataccaaacagactcgtcaacgccgctgatcccgccaccacttttttctgcgcatcgcgttcgcagaggaagacgccgagcgccgccccgacctgcgccataatggcgggcattaacagcgggatcatggtgtcgtagcccagcacggtgaagttattgatacacagcggcaccaggccccagtgcagtccgaacatgacgaagatttgccagaagccgcccattaccgcgcccgcaaatgcaggaaccgcctgataaagccagagataaccggcggcaatcagttcgcttatccaggttgatagcggccccaccagcagaaaggtgacgggtgtgataaccatcagacatagcaatggtgtgaagaaatttttgattgccgacggtaaccacgcattaagtcggcgttccagaatgctgcacaaccaggcagaaaaaataatgggaataaccgatgacgagtaattcaacaatgtgaccggaatacccaggaaatccagccccagcgcatccgctttttgcccgttctcgaaagcagtcagaattaatggatgcactaacgctccaccaatcaccatggcagtaaatggattaccgccgaagcgtttccccgcggtgtatcccaggattatcgggaagaaccaaaacaaggcatcactggcgctgaataaaattaaataagtaccactttgttcggtcgtccactgaaaagtgagcgccagagccagcatacctttcaagatcccggttgccgccatcaaaccgatcagaggcgtaaaaatacctgaaataacataaacaaagcggtttagcagattacctttatcatcattttccggtgcctgttgcgctttttcgtcaaggcctgccacactgttaaccgccaggaagacatcggccacatggttacctatgaccacctgaaactggccaccgctttccaccaccataataataccgggggtctttttcagtacctctgcttgcgctttgctttcatcctttaatttaaaacgtaatcgcgttgcgcaatgcatcagactcacaatgttatctgcgcccccgactcctgcgactatttttctggctaactccgtcataacttgccctctaccgctttgcggcaaaactccaaaaaaaaacctgaaaaaaacggcctgacgtgaatcaagcaatttttttcaggttttgcccgcttagtgcggtaacaatcctttactcagtaataatatttcagtgttctttgcgcacgcgctctatatttatggctaaaaacataatctctgcgggtgaaattttacgttgatactgcaaaccaataaaaatggcgatccgttccgcacattgccatgcttgcgggtaattttgttttactgcttgttgtaatgattcatcactatcgttaattgaagcatgttcaagaatacgccaggataaaaacttcagatgtgtaaccagtcgctgataactcaagctttcttcctggtaattaaggctgaactgaaattttattaattgcagcatttcgcgcattaactgcgtgacacctgcaacatcctccatatttccgctcatttgggcactgaccagatgcatggcaataaagcccacttcatctttcggtaactgcacgcccaaccgtttatcaataatggttaacgcttcttcccctagctggaactctttcgggtaaagccgctggatatcccacagcaacgggttgggcagcaacacgttttgctgaaagcgtttaatcgcaaactggcaatggtcagttagcgagatataaatactgtcctgtaattttcccaagcgctcctgcgctaaagagataatacgatcacaggttgccatcacctcaagaggaatatgacttaagagttcgcttaatcgcccgttcagttcatgactgctcaaggcatactctttttctattccacttgagttaattctttcgccagcgcgtttttgaaagccaattccgcgccccatgacgactttttcccgctgttgatcatcaataaccaccacaacattattgttgagaattttggtgatttgcatgttcatagcaaggaccttttttataaacaaaaaaacccgacttcaccagtattctctggttatgtcaggttttgcctgcgaatgcagtaacaatccagtcatttattaatggtttttataacgaacatccaggttcggaaattaatttaattgcgtgcagagaaaatagcaatgcgctattgataaaaatatgaccatgctcgcagttattaactttgtgtaattttaggaatttataaagttatatataacaaatcccaataattaagttattgggatttgtctggtgaattatttgtcgctatctttccccgccagcagtttatccagctcatcgccaccgacgtgacggaaatcctgccccttcacgtagtagaagataaactcacaaatattctggcagcggtcgccaatacgttcgatagaacgcgcgcagaacagcgcagtaagtacgctcggaatggtacgcgaatcttccatcatgtaggtcatcagttgacgaacaataccttcgtattcctgatcgacttttttatcttcacgataaatacgtaccgcttcgtcaatgtccatccgcgcgaacgcgtccagcacgtcgtgcagcatctggatggtatgacggcccagcgactccagacttaccagcaacggctgatgctgctgggagaatttctccagcgcagtacggcagattttgtccgccacgtcgccaatacgctccagctcggcaatggttttactgatcaccataaccagtcgcaggtcgctcgccgtcggctgacgtttggcgataatgcgcacgcaggcttcatcgatcgccacttccatcatgttgacgttcttgtcgccttcgatgacgcgcttcgccagatcgctgtcctggttatgcatcgcggtgattgcatcagaaagctgctgctccaccatgccgcccatggtcatcacctgcgtgcggatactttccagttcggcgttgaactggccggaaatatgtttattaagattgagactgtccataacgcactcctgaatcaaccgtaacgaccggtgatgtagtcttctgtttgtttcttcgctggcttggtgaacagatcgtccgtgttgctgaactcaatcaattcgcccaggtacataaacgccgtgtggtcggaacaacgcgcagcctgctgcatgttgtgggtgacgatcaccacggtgtaatcctgcttcagttcggtgatcagctcttcaatacgcccggtagagatagggtcgagcgccgaacacggttcgtcgagcagcagcacttccgggcgaatggcgataccacgcgcaatacacagacgctgttgctgaccaccagagagagagtaaccgctctggtgcaatttatctttggtttcgttccacaatgcggctttggtcaatgcccactgcacgcgctcgtccatgtcggcacgggagagcttctcaaacagacgaacgccaaaagcgatgttgtcgtagatggacatcggaaacggcgtcggtttctggaacaccatgcccactttcgcacgcagcagtgcgatatcctgagagttggtcaggatgttgtcgccatcaagcagaatttcaccttccgcacgctgctccgggtacagttcaaacattttgttgaaggtacgcagcagcgtcgatttaccgcagccggacggcccgataaacgccgttacctggtttttagcgatatccaggttgatgtttttcagggcatggaatttgccgtagtagaagttcaaattacgaacctgaattttactcggggcagtttcaaccatactcattgcaatcttttcctcatcgtgcctgatgcacttcgctaatcaggcttaccgtaggccggatcaggcgttcacgccgcatccggcaaagtgttaaccgtgtacagagtcaaaaaggcgctcggtcggtcccctcgcccctctggggagagggttagggtgaggggaaaaccgtgtcagcaatatcaaccgtgtttattcttcgcaaaaacaacgcgcgccagaatgttcagcagcagtacgcacagggtaatgatcaataccccggcccaggccaattgctgccattccgcaaacgggctcatcgcaaacttaaagatcgtcaccggcaggttggcgatcggctgcatcatgtccgtgctccagaactggttggagagcgcggtaaacagcagcggcgcggtttcaccagcaatacgggcaatcgccagcaggataccggtcataatcccggacaccgacgctttcagcgtaatcgcagagatcatcttccacttcggtgtacccagcgcataagccgcttcacgcaggctgtacggcaccagtttcagcatgttctcggtggtgcggataacaatcggcacctgcaacaacgccagggcaatcacgcccgcccagccggagaagtgctccatctgcgccaccacaatggtgtaaacaaacagaccaaccacaatcgacggcgcagagagcagaatgtcgttaatgaagcgaatcacttctgccagccaggatttacgaccatattccgccagataaatccccgccataatgcccagcggcgtaccgaataccgtggcccacaaaattaacagcccgctacccgccagagcgttcgccagaccaccaccttccgtattgggcggcggcgtcatttcagtgaacagcgccagcgacataccgtcgataccgcgagtgatggtggacattaaaatccagatcagccagaacaggccgaaggccatcgtcgccatcgagagcgtcagcgcaatacggtttttgaggcggcgacgcgcctgcattttgcggcgagattcagccagcgccgcagtggtttgcatttcaaccatagccattagcgtgccccctcattcttagccaggcgcataatcataaacttcgatgcggcgaggacgatgaaggtaatcacaaacaggatcaggcccagttccatcagtgcggcaacgtgcagaccggattccgcttccgcaaattcgttcgccagcgcagaggtgatactgttgcccggcatatacagcgaggcgctgtcgagctggtaggtgttaccgatgataaaggtcaccgccatggtttcaccgagcgcgcggcccagccccagcatgatgccgccgataacaccatttttggtgaacggaagaacgatacgccagataacttcccaggtggtgcagccaataccgtaggccgactctttcatcatcaccggggtttgttcgaacacatcacgcattaccgccgcaatgtacggaataatcatgatggcgaggatcacgcctgccgcgaggataccgataccaaatgcggggccagagaacagcgcgccaacaatcgggatattcgacatgatattgccgaccggctcctgaaagtaaacggcgaacagcggcgcaaagataaacaggccccacatgccgtaaacgatacttggaatggctgccagcagctcaatggcgatacccagcgggcgtttcagccagccaggcgcaagctcagtcaggaacagggcgataccgaaactcaccgggacggcgatcagcagcgcgataaacgaagtcaccaacgtaccgtagatcggcaccagcgccccgtagatatcgttcggtgcatcccactctttggtccataggaaagccagaccaaatttctgaatgctcggccaggaggagatgatcagagagacaataatgccacccaacatcaatagcacaatcagcgccgccagttttaccagcacgctgaaaattatgtcgccctttttacccggtgggttaaaagcaggcttggttgcagccataagttactcttcagttaaacgcgtttacaaagtcattttgtaatgccggatgcggcgtaaaacaccgtacccggcctggagttttattagtacagcggcttaccgctactgtctttaatattggtcttccacgcagcgcgaacctgttcaactacactatccggcaggctggcgtaatccaggtcgttcgcctgtttagccccggttttgtacgcccagtcgaagaatttcagcacttctgtgccttgttctggtttcttctgatctttgtggatcagaatgaacgtggtagaggtaataggccatgcatcttcgcctttctggttggtcagatcctgagcgaaggttttgctccagtctgcaccttttgctgcattagcgaagttttcttcggtcggactaaccggtttaccatcagcggagatcagtttggtgtacgccaggttgttctgcttcgcgtaagcatattcaacataaccaattgcacccggcagacgctgaacgaacgcggcgataccgtcgttacctttaccgcccagaccgatcggccattttacggtagagccagtaccaacgttgtttttccactcttcgttcactttcgccaggtagctggtgaagacgaaggaagtcccggagccatctgcgcggcgtactacagcaatgttttgtgaaggcagtttcagacccggattcagtttggcgatggcttcatcatcccacttcttgattttgcccaggtagatgtcgccgagggttttaccatccagcaccagttcgccagacttcagccctggaatgttaaccgccagcaccacgccgccaatcacggtcgggaactggaacagaccttcctgagccagtttttcgtcagacagcggcgcgtcagaggcaccaaaatcaacggtattagcgataatctgttttacgccaccggaagaaccgataccctggtagttaactttattaccggtttctttctggtaagtgtcagcccatttggcatacaccggcgcagggaaggttgcacctgcacctgtcaggcttgcttctgcaaacacagagaaagcactcatcgataaggtcgcggcgacaacagttgcgacggtggtacgcataactttcataatgtctcctgggaggattcataaagcattgtttgttggctacgagaagcaaaataggacaaacaggtgacagttatatgtaaggaatatgacagttttatgacagagagataaagtcttcagtctgatttaaataagcgttgatattcagtcaattacaaacattaataacgaagagatgacagaaaaattttcattctgtgacagagaaaaagtagccgaagatgacggtttgtcacatggagttggcaggatgtttgattaaaaacataacaggaagaaaaatgccccgcttacgcagggcatccatttattactcaaccgtaaccgattttgccaggttacgcggctggtcaacgtcggtgcctttgatcagcgcgacatggtaagccagcagctgcagcggaacggtgtagaagatcggtgcaatcacctcttccacatgcggcatctcgatgatgtgcatgttatcgctacttacaaaacccgcatcctgatcggcgaagacatacaactgaccgccacgcgcgcgaacttcttcaatgttggatttcagtttttccagcaattcgttgttcggtgcaacaacaataaccggcatatcggcatcaattagcgccagcggaccgtgtttcagttcgccagcagcgtaggcttcagcgtgaatgtaagagatctctttcaacttcaatgcgccttccagcgcgattgggtactgatcgccacggcccaggaacagcgcgtgatgtttgtcagagaaatcttctgccagcgcttcaatgcgtttgtcctgagacagcatctgctcaatacggctcggcagcgcctgcagaccatgcacgatgtcatgttcaatggaggcatccagacctttcaggcgagacagcttcgccaccagcatcaacagcacagttaactgagtggtgaatgctttagtggatgccacgccgatttctgtacccgcgttggtcattagcgccagatcggattcgcgcaccagagaagaacccggaacgttacagattgccagtgaaccaaggtaacccagctctttcgacagacgcaggccagccagggtatccgcggtttcgccagactgtgacaaggtgatcatcaggctgttacgacgcacggcagatttgcgatagcggaattcagaggcgatttcgacgtcgcacggaatacctgctagcgattcaaaccagtagcgggaaaccataccggagttataagaagtaccacaggcgaggatctgaatatgctcaaccttcgacagcagttcgtcggcgttcggtcccagctcgcttaaatcaacctgaccgtggctgatgcgtccggtaagggtgtttttgatcgcgttcggctgttcgtagatctctttctgcatgtagtgacggtaaatgcctttatcgcccgcgtcatattgcagattggattcgatatcctgacgttttacttccgcgccagttttatcgaagatgtttaccgaacggcgagtgatttccgcaatatcgccctcttcaaggaagataaagcgacgggtcaccggcaacagcgccagctggtcagaagcgataaagttttcgcccatccccaggccaatcaccagcggactaccagaacgtgccgccagcagggtatccgggtgacgggagtccatgatcactgtaccgtacgcaccacgcagctgcgggatagcacgcagaacggcctcacgcagagtcccgccttgtttcagctcccagttcaccagatgggcaatcacttcggtgtcggtttcagaaacgaaggtatagccacgcgcttttagctcttcacgcagcggttcatggttttcgatgatgccgttatgcaccaccacaatgtgttcagaaacatgcggatgcgcattcacttctgaaggttcaccgtgggtcgcccagcgagtgtgagcaataccagtgccgccatgcagaggatgttcttccgctgcctgtgccagcatctggactttaccgaggcgacgcaggcgggtcatatgaccttctgcatcaacaacggccagaccggcagagtcatatccgcggtattccagacgacgtaaaccttcaagaaggatttctgctacatcacgttgcgcgatcgcgccaacaattccacacatagtttttgattccgatttatatcgttgtcggtcaacctgtatgcccgttttttcgggcgccccgagccttgtagagagtggggttatttttatagttactgcttgtgggagggagattatgttatctcctcatcccatgtgaccgggttagccggccagaatcactttttctttaccggacgacgccagccttctttctgagtctgcggcacacggctgatagctaatgcattttcgccgacattacgcgtcacagttgtacccgcagcaatggtcgcgcctttgcctactgttaccggggccaccagctgagtgtcggaaccaacaaacacatcgtcgccgataatggtcttaaatttattcgcaccatcgtagttgcaggtaatggttcccgcgccgatgttaacgttatcgccaatttccgcatcgcccaggtaagtcagatgaccagctttcgagcctttacccagacgcgcttttttcatctcaacgaagttaccgacgtgagcaccttccagcaactcagcaccaggacgcaaacgggcaaacgggccaatggtacaggccgctgccagattcgcatcttccacaacggtatacggactgatttcgcaatcatcgccaatcacgctgtttttaatcacgcaaccggtgccaattttcacgcgatgaccgagagtcacgttgccctcgatgataacgttagtatcaatttcaacatcgcgcccgtgagttagcgtaccacgcagatcaaaacgcgctggatcgcgcagcataacgcctgctaacagcagtttttcagcctgttcggactgataaacacgctccagacgggagagttgcaggcggttattcacgccttctacttcgcttaaacgttgcggatgaacggcgacgatttcacgcccttcctgatacgccagcgcaataatgtcggtgatgtagtattcgccctgagcattattgttggtcagcttcgccagccagcgtttcatatctgcgccgttggcaatcagaatgccggtgttgatctcctgaatctgacgctgctcgtcggtggcatctttgtgctcaacaatgccggtaactttgccgttttcacgggtgatacgtccataaccggtcggatcatccagtttcaccgtcagcagaccaatgccaccctgcggtttagcatcacgcagacgctggagtgtttcgacagagatcagcggcacgtcgccgtagagcattaaaatgtcttcatcatcggcaaagaaaggtgcggcctgctgcattgcatgacccgtacccagctgctctgcctgaagcacccagttaaggttgtcgtctttcagcgcctgttttagcagatcgccgccgtgaccgtacaccaggtgaacgtgcgctgcgcctaattcattcgcagcatcaatgacatgctgaaccatcgctttcccggcaagggtatgcagcactttcggaagatcggaatacatgcgcgtgcctttgcctgcggcaaggatcactacgctcatagcattattcaacatacgcgtcctgactgtaatttgagaacgaatttaaaccgcttcaccttgaaaaaactacatttttttcatcgtgaaatggacagaggataaattgttcaataacggattatccccgctgacgaaagcgccattttcgaccatcgtcacgccttttgtctgcagaaaattaaggcagtaccttaatttaagcgtcaggtggatgtttttgctcttatttcgatcaatgaataaacaggaaaacaggggggttttatatcagcaggatctatgtgaacgctattcaggacgggtcacacgcgcaaaaaaaagccagcctgtttccagactggcttttgtgcttttcaagccggtgttacatcgcttttttggtcaactcgataacgcgcagctgcgcgatcgctttggccagttccgcagacgcctgagcgtaatctacgtcgccgtgagagctgctaatgtgctcttcagccttacgtttcgcttccatggctcgcgcttcgtcgagatcctggccgcgaattgcggtgtcggccagaacggtcacgttgccaggctgcacttcaagaatgccgccagacagatagataaactcttcgtgaccgtgctgtttcacgatgcgaatcataccaggcttaatggcggtgagcagcggtgcgtggccagggtagatccccagttcaccttcgctacccgttacctggattttctcgaccagaccagagaacatttgttgctctgcgctgacgacgtccaggtggtaagtcattgccatatcaccctccgattaaggcgttaaagttttttggctttttccacagcttcttcgatggaaccgaccatgtagaacgcctgctccggcaggtgatcgtattcgccttccatgatgcctttaaagccacggatggtgtctttcagggagacgtatttacccggagaaccggtgaatacttctgccacgaagaacggctgggacaggaagcgctggatcttacgagcacgcgctaccaccagtttgtcttcttcagacagttcatccatacccaggatggcgatgatgtctttcagttcctgataacgttgcaggatggactgaacgccacgcgcggtgtcgtagtgttcctgaccaaccaccagcgggtccagctgacggctggtggagtccagcgggtcaacggccgggtagatacccagagacgcgatctgacggctcagtaccacggttgcgtcaaggtgcgcaaaggtggttgccggagacgggtcagtcaagtcatccgcaggtacgtatactgcctgtacggaggtgatagaaccagttttggtggaggtgatacgttcctgcagaacgcccatctcttccgccagggtcggctgataacctaccgctgaaggcatacggcccagcagtgcggatacttccgtaccggccagggtgtaacgatagatgttgtcaacgaacagcagaacgtcacgaccttcgtcacggaatttctcagccatggtcagaccggtcagagcaacgcgcagacggtttcccggcggctcgttcatctggccatacaccagggatactttgtcgataacgttggagtcggtcatttcgtggtagaagtcgttaccctcacgagtacgttcacctacgcccgcaaacacagagtaaccggagtgctcgatcgcgatgttacgaatgagctccatcatgtttacggttttacctacacccgcaccaccgaacagaccaactttaccgcccttagcgaacggacacatcaggtcgataactttgataccggtttccagcagttcctgagagtttgacagctcttcgtaggaaggtgctgcgcggtgaatcgcccaacgctcttcttcaccgatctcgcctttcatgtcgaccggttcacccagtacgttcatgatacggcccagagtcgctttacctaccgggacttcaatcgggtgttcgaggtcttttacatccagaccgcgacgcagaccgtcggaggaacccattgcgatggtacgtacgataccgccgccgagctgctgctgaacttccagcaccagacgctcattaccattttgcacctcaagagcatcgtacacgcgcggtacggcatcctgagggaattcgacgtcaactacggcgccgattacctggacaatctttccagtagccatcttaaatcctctacgaaataacctgtttaaaccgcggcggcccccgagacgatctcggtgagttcctgagtaatgctggcctgacgagctttgttgtataccaactgcagctctttaatcaggctgccgccattgtcggtcgcggctttcatcgccaccatacgggcggcctgctcgctggccaggttttcaaccacgccctgataaacctgagattcgacataacgacgcagcagggtatccagcaacgccttcggatcgggttcgtacaggtaatcccaggatttatgtttcagatcatcatcatctgatgccggtaacggcagcagctggctgatggtcggaacctgagacatggtgttaataaatttgttgctgacaatgtaaagcttgtccagacggccttcgtcgtaggcctgcaacatcacttttaccggaccgatcagttcggacagggaagggttatcccccatgccggtgacctgggcaacaacattgccgcccacggagttgaagaacgacacgcctttcgagccgatcattgcgaggtcgcattgaacgcctttgtcggtccaggtcttcatttccgccagcagttttttgaacaggttaatgttcaaaccaccgcacaaaccacggtcggtcgacaccaccaggtagcccacgcgtttaacgtcgcggtcttccaggtaagggtgcttatattccagattaccgtgtgcaaggtgaccaatcactttgcgcatggtttctgcataaggacggctggccgccatgcgatcctgcgatttacgcattttggaagcggcgaccatctccatcgctttagtgatcttttgcgtgttctggacgcttgcgatcttactacgtatctcttttgcgccggccatgagcttctcctcaatgccttgcggcctgccctaaggcaagccgccagacgttaccaggattgggttgctttgaaggaatcgaggatgcctttcagcttgccttcgatttcgtcgttgtagccaccggtctggttgatctcttgcatcaacggagcgtgatcacggtcgacgtaagccagcagagcggcttcgaagctgccaattttcgacagttcaacatccgccaggtaaccacgttctgctgcgaacagaaccagagactgctgcgcaacggacatcggcgcatactgtttctgtttcagcagttcggtcactttctgaccgtggtcaagctgcttacgtgttgcatcgtcaaggtcggatgcaaactgagagaacgctgccagttcacgatactgtgccagagcggtacggataccaccggacagttttttcatgatcttggtctgtgctgcaccaccaacacgggatacggaaatacccgggttaaccgcaggacgaataccggcgttgaacaggttggtttccaggaagatctgaccatcggtaatggagattacgttggtcggaacgaacgcagaaacgtcacccgcctgagtttcgataatcggcagtgcggtcagagaaccggttttccctttcacttcacctttggtgaaggcttcaacgtattcggcgttaacacgtgcagcacgctccagcagacgagagtggaggtagaaaacgtcgcccgggaatgcttcacgtcctggcggacgacggagcagcagggagatctgacggtaagcaacagcctgtttagacaggtcatcgtaaatgatcagcgcatcttcaccgcggtcacggaagtattcgcccattgcgcaaccggcatacggtgccaggtattgcagtgcagcggattcagacgcggttgctaccacaacgatggtgttagccagtgcgccgtgctcttccagtttacgtaccacgttagaaatggtggacgctttctggccgatagcgacatagatacatttgataccggaatcgcgctggttgatgatggcatcgatagccagtgcggttttacctgtctgacggtcaccgatgatcaattcacgctgaccacgaccgattgggatcatggagtcaacggctttataaccggtctgtaccggctgatctacggactgacgttcgataacgcccggagcgattgcttctacagcagagaagccgtcgtgatccagcggacctttaccgtcgattggtgcacccagagtgttaaccacacggcccagcaggccacggccaaccggaacttccaggatacggccagtacacttaactttcatgccttcggcaaggtcagcgtacggacccataacaaccgcacctacagagtcgcgctcgaggttcagtgcgatagcgtaacggttacccggcagggagatcatttcaccctgcatacaatcggccaggccgtgaatgcggataacaccgtcacttacagaaacaatagtaccttcgttgtgagcttcactcacaacattgaactgagcaatgcgctgcttgatcagttcgctgatttcggtggaattcagttgcatgctccagtccccttaagactgcaagacgtctgcaaggcgctcaagacgaccgcgtacgctgccatcaatgaccatatcacccgctcggatgataacgcctgccattacagacttatcgattttgcaattcagcttaactttgcgtgacagacgtttttccatcgcagcagaaattttcgcgagctgttgttcactcagtgcggcagcggaaatgacgtctacctcagcggtagcctcactcacggcacgcaggtgaataaactgctccagaacatccgggagcgcgttaagacgaccattttcagccataacccgaatcaggttctgaccgttttcgtccagttgctcaccacaaactgcgataaacgactcggcgagcgtttctggcgcaagcgcgccagagagaagctctgccatttgttcgtttttggttacctcggcggcaaacgccagcatgtcctgccagcgttctacactttggtgttcgacggcaaagtcaaaagctgctttggcgtaggggcgagctaccgtaataaattcagacatcagcccctccctccttacagttcagcgacaagtttatccacgatgtcgctgttagcagcttcatccacggaacgttcgatgatcttctcggcgccagcaacagccaggatagcaacttgcttacgcagctcttcacgggcacgtttacgctcggcttcaatttccgcctgcgcctgggccacgattttagtacgttcctgttctgcctcagctttcgcttcgtccagaatctgcgagcggcgtttgttcgcctgctcgatgattacctgggcttccgctttcgcttttttcagctggtcggtcgcgctggcctttgcaaggtcaaggtccttatgtgctcgttctgcggaagcaaggccgtcagcaatttctttttgacgtttttcgatggctgccattaatggcggccatacgtacttcatgcagaacagaacgaacaggacaaacgcgatggcctggccgaggattgttgcgttaagattcacagcacaatgcctctatttagttaacgttctgatattgctctttaaataaaagcaacgcttactacgcgacagcgaacatcacgtacagacccagacctacagcgatcatcgggatagcatccaccagacccataacgataaagaactgagtacgcagcagaggaatcagatcaggttgacgcgctgcgccttccaggaatttacccccgaggatgccgataccgatcgcagcaccgattgccgccagacccatcatcacagcggcagccatgtacagcagatccatattcaggttttccatgacagtctccagtttgtttcagttaaaacgtagtagtgttggtaaattaatgttcttcagacgccatcgacagatagacgatcgtcagaaccatgaagatgaaggcttgcagcgtaatgatcaggatgtggaaaatggcccacggcacattcaggatccactgtgaccaccacggcaacagaccagcaatcagaatgaaaatcagctcaccggcatacatgttaccgaacagtcgcaaaccgagtgaaactggtttggacagcaggcttaccccttcaaggattaagttgacaggaatgaacgcccagtgattgaacggctgcagcgtcaactctttcgtgaagccgccgatgcctttcattttgatgctgtagaacagaatcaggataaatacgcccagtgccatagacagcgttacgttcacgtccgcagacggaaccacacgcagtgcaggcagacccagtacatgttcagcaatgtacggcagcaggtcgataggcagtaaatccatcaggttcatcaggaatacccagacgaagatcgtcagggccagcggagcaatcagcttgcttttgccatggtacatgtctttcacgctaccattaacaaagccgatcaccagctcaatcgcggtctgaaacttacctggcacaccgctggtcgcctttttggctacgctacggaataaaaccaggaacaacagacccagcaccaccgagaagaacatggagtcaatattgattgtccagaaggtggctggggggttttgtggatccaccagcgagaatgtacgcaggtccagctgaaggttattcaggtggtgtcctatgtaatcctgcggcgtcatattttctgaagccatgatgccttttaccctttgttgttaattacagccggtgccagtatctgaaccaccagcaccaaaacccacgtaacgatcagcggcaagaataccgcctttaaaaccgccaacgccaccaccagtaacaccaacatcgccagaactttgaaagcttcgccaaatgcgaatgtccaggccacccggcctttcgctggtgtatgcgcctggtgacgccaggcaaatatcataaacaaaacgttaggcagaaagactgccaggcccccgcttattgcagagacgccccagaaggggtctttgaggctgaacagcaatccacttgctatcaccaccagtaactgaacgagcagaagcttccgagcaacgtttcgactcacgagcgacacagacatcacgtttttcactcctgctcccttcgaggtatgccgcgtgtcgtataaaactttctttaaggcttagagtcaagcatcaaaaagcggtcaaattatacggtgcgcccccgtgatttcaaacaataagtagccaaaaggtgaataaatgtttaaatatttttccagtgcatacaattgcgacttttctgctaaccctgttcgatcatgaaaaactgtaaataacgcgtaaacactggtgataaagcgtgcttcagatcacatattgcgcatgttcgcgcacagcatatttatttacttggcaaatgatgcctttgcaagtttatgatatttcagtctaaaaacagatactgttttaataaatgacatttacacaacaaaaaccacccattgacatttttaataatgttttaacagccaatgatggttcttagcgccgatttttagcagactgatattttcactaatgacttattttctgcttaccaaaaaaagccacgttatcttgttgatgcaaaagagtgaacgtggcgttaaatgtaaccagttatatcagtagaaaacctggttgttgttaacagtctaaccggtcaattttttatgatttttttgataaaaattaaattttatttgctttaatcaccaccagatgacgttcgccatccagggctggaacctgaagtttaaccactgattcgacctgatattcttcgggcaacaaagcgatttcatcttccggcatttgccctttcagcgcgtagaaacggccttgctcaccaggaagatggtggcaccagctcaccatatcgttcagagaggcaaaagcgcggctaattacgccatcaaatggcggctctgaaggaaactcttctaccctgctctgtactggttcaatattctccagtttaagctcatgttgcacctgacgaaggaaacgcacgcgtttaccaaggctatccaacagagtgaaatgggcttcaggacgcacgatagagagtggaatgcctggcagtcctggtccggtgccgacatcgataaaccgttcaccttgcagatacggtgccaccacaatgctatcgagaatatggcgtaccagcatctcattaggatcgcggaccgaagtcaggttgtacgctttgttccatttatgcagcatattcacgtaggcaataagctggtttttctggtgatcggtaagcgaaatacctgcgtctttcagcagtaaggagagtttgttgagcacggtgattacctgttcttgatgcgttgcctggtaagcgggtgcttaccaggcatttttaatgcgttatgcgctacgacgcagcataccctgttttttcagccacaccagcagaatggagatggccgcaggcgtgacgccagaaatacgcgaagcttggccgatagaggctggtttgtgatcgttaagtttggcgatcacttcgttagaaagaccggatacctggcggtaatccagtgtcgcgggtagcagggtgttctcgttacgcagctgcttttcgatctcatcttgctggcgcgcgatataaccttcgtatttaacctgaatctcaacctgttccgccgcctgttcgtctgtcaacgcaggggcaaacggcgtcagcgtggttaatttttcataagtcatttccggacgacgcagcagatcttcaccactggcttcacgggaaagcggcgcagtcaggtgagcattcacttcggctgcagcttccgccgacggggttacccaggtcgatttcagacgctgacgctcacgctcgatattctcaagtttctcgttaaagcgcgcccaacgttcgtcatccaccaggcccagttcacgaccgatttcagtcaaacgcagatccgcattatcttcgcgtagcatcagacgatattctgcgcgcgaagtaaacatacgatacggttctttggttcctaaagtgcacaggtcatcaactagtacgccgagatacgcctgagaacgtgccggagcccaaccttctttgtcagcagacagacgggcagcgttaagaccggccagcaaaccttgcgcagcggcttcttcgtaaccggtagtgccgttaatctgaccagcaaagaacagcccctggataaacttgctctccagcgtcggtttcaggtcgcgaggatcgaagaagtcatactcaatggcataacccggacgcacgatcttcgcgttttccatcccctgcatagagcggacgatttgcatctgcacatcgaacggcaggctggtggagataccgttcggataaatttcattagaggtcagtccttccggttcaaggaagatctgatgctgatttctgtcggcgaagcgcatgactttgtcttcgatcgacgggcagtagcgtgggccgacaccttcgatcacccctgcgtacattgggctacgatcgaggttactgcggatcacatcatgggttttctcgttggtatgagtgatataacacggcacctgctggggatgctgggacgcattgcccataaacgagaataccggcattgggttatcgccatgctgttgcgccagtacgctaaagtcgatggttcgagcatcaatacgcggtggtgtcccggttttcagacgaccaacgcgcagcggcagttcacgcaaacggcgagaaagcggaatggacggcggatcaccagcacggccaccgctgtaattatccagaccgatatgaattttaccgtcgaggaacgtcccaacggtgagcacgacggctttggcacggaacttcagtcccatttgggtaacagcaccgaccacgcgatcgttttcgacaataagatcttcaaccgcctgctggaagatcatcaggttcggttggttctccagcgccgtacgtaccgcctgacggtagagcacacgatccgcctgagctcgggtagcgcgaaccgccggtcctttgcttgcgtttagtatcctaaactggatacccgcctgatcgatcgctttcgccatcagaccgccgagtgcatccacttcttttaccagatgtcccttcccaataccgccgatcgccgggttgcagctcatctgccccagagtgtcgatattgtgtgtcaaaagcagagtctgttgacccatacgcgccgcggccatcgcggcctcggtgcctgcatgacccccgccaatgatgatgacgtcaaaaggatccggataaaacatggtgattgcctcgcataacgcggtatgaaaatggattgaagcccgggccgtggattctactcaactttgtcggcttgagaaagacctgggatcctgggtattaaaaagaagatctatttatttagagatctgttctattgtgatctcttattaggatcgcactgccctgtggataacaaggatccggcttttaagatcaacaacctggaaaggatcattaactgtgaatgatcggtgatcctggaccgtataagctgggatcagaatgaggggttatacacaactcaaaaactgaacaacagttgttctttggataactaccggttgatccaagcttcctgacagagttatccacagtagatcgcacgatctgtatacttatttgagtaaattaacccacgatcccagccattcttctgccggatcttccggaatgtcgtgatcaagaatgttgatcttcagtgtttcgcctgtctgttttgcaccggaatttttgagttctgcctcgagtttatcgatagccccacaaaaggtgtcatattcacgactgccaataccgattgcgccaaagcggactgcagaaagatcgggcttctgttcctgcaatgcttcatagaaaggagaaaggttgtccggaatatctccggcaccgtgggtggagctgataaccagccagatccctgaggcaggtaaatcttctaacagcggaccgtgcagcgtttcggtggtaaaacccgcctcttccagcttttcagccaggtgttctgctacatattcggcaccgccgagggtgctgccgctgataagagtgatatctgccataaaccgccacctttattaagagtggcgtattgtacgctgtgaacgcgttgggatctacctgtggaaaagtatgggattaaaaaagccgatcagggcttgatggtacgcatgatcgggttttgcaggacgatcaatgtctcggtggactgaatttcatcaattgtttggatcttgttgataagtacatgctggagagcgtcgatcgaacggcacatcacttttataaagatgctgtagtggccggttgtgtaataggcttcagtgacttcatcaaggctttccagctttgccagcgcggaagggtagtctttggcgctctttaatataatgccgataaagcagcctacgtcataaccgagctgcttcgggctgacatcaatacgcgccccggtaatgatccccgcctgcttcattttctctactcgaacgtgaatcgtccccggactgacgccaaattgtttcgccagttcggcgtaagcggtgcgcgcattgcccattaatgcttccaggatgccacggtccagattgtcgatcagataattttccataggattttcttatgcggattgatgattcattctattttagccttcttttttaatgaatcaaaagtgagttaggctttttattgaatgattattgcatgtgtgtcggtttttgttgcttaatcataagcaacaggacgcaggagtataaaaaatgaaaaccgcttacattgccaaacaacgtcaaattagcttcgtgaaatctcacttttctcgtcaactggaagaacgtctggggctgatcgaagtccaggcgccgattcttagccgtgtgggggatggcacgcaggataacttgtcgggctgtgaaaaagcggtgcaggtaaaagtgaaagctctgcctgatgcccagttcgaagtggttcattcactggcgaagtggaaacgtcagaccttagggcaacacgacttcagcgcgggcgaagggctgtacacgcacatgaaagcccttcgccccgatgaagaccgtctttctccgttgcactcggtctatgttgaccagtgggactgggaacgcgtaatgggcgacggtgagcgtcaattctcgactctgaaaagcacggtagaggcgatctgggcgggaattaaagcaaccgaagctgcggttagcgaagagtttggcctggcaccgttcctgccggatcagatccacttcgtacacagccaggagttactgtctcgttatccggatcttgatgccaaagggcgtgagcgggcgatagcgaaagatcttggcgcggtattccttgtcgggattggcggcaagctgagcgatggtcatcgccacgacgtgcgcgcaccggattatgatgactggagcaccccgtcagagctgggccatgcgggtctgaacggcgatattctggtgtggaacccggtactggaagatgcgtttgagctttcctccatggggatccgtgtagatgccgacacgctgaagcatcaactggcgctgaccggtgacgaagatcgcctggagctggagtggcatcaggcgctgctgcgcggtgaaatgccgcagaccatcggcggcggtatcggccagtctcgtttgactatgctgctgctgcaactgccgcatatcggccaggttcagtgtggagtatggccagctgctgttcgcgagagcgtcccttctctgctgtaataatttatcgccgccagcgtctgagcaggcggcttcgcatcccggtatcaaagcgccagatatgatcgaaaatgcgcatgatgccgggtttgccgtgtgccgacatcgccacggcatgaaagcgatgctgatgtacccgctgcagctctttcactttactcgtcacgtcgtcaggcaaccgctgagcgataaaatcagaaatcaccaccgcatcggcatcaaaccattccctgctttgcaagcgttccataatggcgcgaaaacaactggcaagatcggtgccgccacgaaactgctggcttaaaaaacggattgcttgttcgatgccttgtgggcctgaaagctcataacggacgatctcggtggaaaatagcataatatagcagcgccggttttctgcgagagcaatgcgcatcaaggccaggcagaacgctttcgcacactgttcattaaagccgcccattgagccggaagtatccacacagacaataaacggcccgcgcggctgttcatcgtaatctttatgtaccaccggacgttcgatcactttttcacgccacgactcaccgtgcaggcgataggtgagcaactgtttttccaccagccgacggtaaaactcatactccagttccgttatccctagtgtcgccagttctggcggcaggagacgtaaaatatcatcgctttgttgcagaccatcaacctgctcaggaaccgtcgccggttcgcgcaccatggtgcggaaggtttccatctgcgcatcgttgcgcggtattgatttggcttcccgagaacgccccagctgctctgccaggcgtttcagttccggctgttcgttaagaaattcaccgtatttcacaatcaactgatagtcgccacgtttaagctgaccggcgctcatatcccacagacgaccagctgcagtattgttatctgcgagaatcggttcaagttgtccgctcagcgtcatgcgttcctgaacttcactcaacagttgttcgcgttcttcttctaatagctgttgatttaacgtcgttgcttgcacgatcagacttaaacgccaacgctggagaaaaagcgtgtgtaacgctgaagtgatcgtgctgttagcatcaaccaactgtcgggcttgttctgcccatggagaattcagacgatgcagtaagtccaggatctgtggtagctgcacaataaactgtggcgtggagaggagctggctttgctgatagcacatcacctcttcggtgagttccggcgggactcgggcatctttcagccgactgcgcagcgcttcacgccagcggggaacatcatcagtgattgccgccttcaggcgtgggaatttttcaaagaagaccgccagctgcggtgaggccagcagtgcgatgatcatctcttcgatcaatccctcttcgctgacggccagcatcacattaagcgtatccagcgttagcattgttgtgcctggcgaatctgtgcaccgacatcctgtaggctggcttcaatgcgacctaaccagtcgccagggataaacagacatttttgctgttcgctgaataaagcgtgttgcttgcgccagtcgctttcaagctcttccagttgttgttttatttcaccaggcagaccttcagccgatgaaccgggaagtgccagcgtactgccttgtaaacttacatcgcgaacgacaagatgttgggcgctatcaacttccagattcagtttctgggcaaagccgataccgttcagtttaccgcgaatttcaccacctttgctcagccactgttccagcgcgctacgctcaaaggagatatgaaccacttccatatcatgcagttttaacggtttttgcagcagtagagtcagagtggaagcagtaacgttaacaggaagttgatactgctgacgacggctgaaaatgccgcccagacgaattaccgttaaggctgttttatcgctttgttgctgctggagttgcaggtgacgttgcacaatcgcgccaaggcgagtcaacatcccttgctgttgccaggcgtgaccggtcatcaatacatcaatttgttgttgtatcaaattcaggctttgcgcgtcataccacaggcaatctttcagcaaaatgagatctaccggggcaacagcactgcgaccgctaaaaaaggcgctggcctgcaataatcggatcgcttttttccagcgacgatccgagacataaggcgcatccggtaatttatccagttgctggcgcagcataaaaatcagctcaaatacatgatcgggcagcgtaatttcaccaatctctttctgccagcgttcatattcttcatctgtgacctgcaaggcatcaggaaccggattgtcgttttcatcctgttgactggtcagcatggagcggaaattcgctttatcctgcactttatctaaccacagacgaatcagcatgcggtcatataacgcttccagactgctgtctgcttccggcagctcgttggaggccgccaccagcagacgcatcgggattttttctacgtgtgcaccgttgcggaactggcgctcgttaatggcggtgagcaaggtattaagaattgccgggcccgctttccagatctcatccagaaagacaatttctgcttccggcaggtaaccgctggttaaacgttcatagcgcccttcatcttttagcgcctgaatagaaaggggaccaaaaacttcttccggcgtggagaagcgggtcatcagatattcaaacgcgcgggcattctgaaaggcgaattttaagcgccgggcgatcaaacttttggcaatacctggcgggccaaggaggaacacactttcaccacttaatgccgctaataaacacaagcggatggcgtggctacgttcataaagccccttttccaacgaactgctcaggcgggaaattctttccgctaataaatgagggtgagccataatgaagtggcgtcctttcgtcaaaagttctgcgtaaattgcgagtatagacgtttcttgctggtggctaaaatagtctcaaagggggggtatttttctttgagccaggttaatgtggccgcatttaggagtacgattttgccgttaatcgtgcatactgtgcgcttttttgtgggccaagggactaagcacacatttcatatttcaacgaaagactagtctatgagcactgataataagcaatcattgcccgcgattaccctcgcggcgattggagttgtctacggcgatattggtaccagcccgttatatacacttcgtgaatgtttgtccggccagtttggttttggcgttgaacgcgatgccgtgtttggctttttatcgctgatcttctggctgctaatctttgtggtttccattaaatatctcaccttcgtgatgcgggcagataacgccggtgagggggggatcctgacgttgatgtcgcttgccgggcgtaatacgtcggcgcgaaccacatcaatgctggtgattatggggctaatcggcggcagctttttctatggtgaagtcgtcataacacccgctatttcggtgatgtcagccattgaaggtctggaaatcgtcgccccgcagctggatacctggatagttcccctctcaattatcgttctcactttattatttatgattcaaaaacatggcacggctatggtcggtaagctgtttgcgccgatcatgctgacctggtttttgattctggcaggactggggttacgtagcattattgctaacccggaagtgctgcatgcgctgaatccaatgtgggcggtgcatttcttccttgaatacaaaacggtttcttttattgcattaggggcagtggtgttgtcgattacgggggtcgaggcgctgtatgctgatatggggcactttggtaagttccctattcgcctggcgtggttcaccgtcgtattaccttccttgacccttaattacttcggtcagggagcgctgttgttaaagaacccggaagcgattaagaacccgttcttcctgttggcaccggactgggcgctgatcccgctgctgatcatcgccgcactggcgacggtaattgcctcgcaggcggttatctctggcgtcttctcattgacgcgtcaggcggtacgtctgggatatttgtcgccgatgcgcattattcacacctccgaaatggagtcagggcaaatctatattccgtttgtgaactggatgctctatgtcgcggtcgtgattgtgattgtcagctttgagcactccagcaacctggcggcggcgtacgggattgcggtgaccggaaccatggtgctgacgtctattctctcgactaccgtggcacgtcagaactggcactggaataagtattttgttgcgctgatcctgattgctttcctttgtgtcgatattccattgttcaccgctaacctcgataaactgctctccggcggctggttgccattgagcctcggtactgtgatgtttatcgtgatgaccacctggaagagcgagcgtttccgcttgctgcggcggatgcatgaacatggtaactctctggaagcgatgattgcttcgctggagaaatcaccgcctgttcgcgtgcccgggaccgcggtgtatatgtcgcgtgcaatcaacgtcattccctttgcgctgatgcataaccttaaacataacaaggtattgcatgagcgggtgattctgttaactctgcgcaccgaagacgctccatatgtccataacgtccgtcgggtacagattgaacaactgtcgcccactttctggcgcgtggtggcaagttatggttggcgagaaacgccaaacgtagaagaagttttccaccgctgcggtctggaaggattaagttgccggatgatggaaacctccttctttatgtcgcatgagtcgttgatcctcggcaaacgcccgtggtatttgcgtctgcgcggcaagctgtacttgctgctgcaacgtaatgcgctgcgtgcaccagatcaatttgaaatcccgccaaacagggttatcgaactgggtactcaggtcgaaatctaacgccagacgcctcctttcttcataagggggcgtttttgttttcatggttaatcaccatgtaaaacgtttcgaggttgatcacatttccgtaacgtcacgatggttttcccaactcagtcaggattaaactgtgggtcagcgaaacgtttcgctgatggagaaaaaaatgaaaaaaggcaccgttcttaattctgatatttcatcggtgatctcccgtctgggacataccgatacgctggtggtgtgtgatgctggtttacccatccccaaaagtacaacgcgtatcgatatggcattaacccagggtgtaccttcttttatgcaggtgctgggcgtcgtcacaaatgaaatgcaggtcgaggcggccattatcgcggaagagatcaaacaccataatccgcaactccacgaaacgttgctcactcaccttgagcagctgcaaaaacaccagggaaataccattgaaattcgttacaccacgcatgaacaattcaaacaacaaaccgcagaaagtcaggcggtaattcgcagcggagaatgttctccgtatgcgaatatcattctctgtgctggcgtgacgttctgaggccgtcatggaagcattacttcagcttaaaggcatcgataaagccttcccgggcgtaaaagccctctcgggcgcagcgttaaatgtctatccgggccgcgtgatggcgctggtgggcgaaaacggcgcgggtaaatccaccatgatgaaagtgcttactggcatctatactcgcgatgccggtacgcttttatggctggggaaagaaacgacatttaccgggccaaaatcttcccaggaagccgggattgggattatccatcaggaactgaacctgatcccgcagttgaccattgccgaaaacattttcctcggtcgtgagtttgttaatcgctttggcaaaattgactggaaaaccatgtatgccgaagcggataaattgctggctaaacttaacctgcgctttaaaagcgacaagctggtgggcgatctttccatcggtgaccagcaaatggttgaaatcgccaaagtgctgagctttgagtcgaaagtcatcattatggatgaaccgaccgatgcgctgaccgataccgaaaccgaatccctgttccgcgtcatccgcgagctgaaatcgcaaggccgcggtattgtctatatctcccaccgcatgaaagaaatcttcgagatttgcgatgacgttaccgtttttcgtgatgggcaatttattgctgagcgcgaagtggcatcactgaccgaagattcgctgattgagatgatggtgggtcgcaagctggaagatcaatatccgcacctggacaaagcgccgggagatatccgcctgaaagtcgataatctctgcggacctggcgttaacgatgtctcttttactttacgcaaaggcgaaattcttggcgtctctggtttgatgggcgcaggtcgtaccgaactgatgaaagtgctctacggcgcactaccgcgcaccagcggttacgtcaccctggatgggcatgaagtcgttacccgttcaccgcaggatggcctggcaaacggcattgtgtatatctccgaagaccgtaaacgtgacggtttagtgttgggcatgtcagtaaaagagaacatgtcgctgacagcgctgcgctacttcagccgcgctggcggcagtttgaagcatgccgatgaacagcaggctgtgagtgatttcattcgtctgtttaatgtgaaaactccgtcgatggaacaggcaattggtctgctttccggtggcaatcagcaaaaagtggcgattgcccgcggtctgatgacacgccccaaagtgttgatccttgatgaacctacccgtggcgtagatgtcggcgcgaaaaaagagatctatcaactgattaaccagttcaaagccgatggcttgagcatcattctggtgtcatcggagatgccagaagtattaggcatgagcgatcgcatcatcgtcatgcatgaagggcatctcagcggggaatttactcgtgagcaggccacccaggaagtgttaatggctgccgctgtgggcaagcttaatcgcgtgaatcaggagtaaaaaaatgacaacccagactgtctctggtcgccgttatttcacgaaagcgtggctgatggagcagaaatcgcttatcgctctgctggtgctgatcgcgattgtctcgacgttaagcccgaactttttcaccatcaataacttattcaatattctccagcaaacctcagtgaacgccattatggcggtcgggatgacgctggtgatcctgacgtcgggcatcgacttatcggtaggttctctgttggcgctgaccggcgcagttgctgcatctatcgtcggcattgaagtcaatgcgctggtggctgtcgctgctgctctcgcgttaggtgccgcaattggtgcggtaaccggggtgattgtagcgaaaggtcgcgtccaggcgtttatcgctacgctggttatgatgcttttactgcgcggcgtgaccatggtttataccaacggtagcccagtgaataccggctttactgagaacgccgatctgtttggctggtttggtattggtcgtccgctgggcgtaccgacgccagtctggatcatggggattgtcttcctcgcggcctggtacatgctgcatcacacgcgtctggggcgttacatctacgcgctgggcggcaacgaagcggcaacgcgtctttctggtatcaacgtcaataaaatcaaaatcatcgtctattctctttgtggtctgctggcatcgctggccgggatcattgaagtggcgcgtctctcctccgcacaacccacggcggggactggctatgagctggatgctattgctgcggtggttctgggcggtacgagtctggcgggcggaaaaggtcgcattgttgggacgttgatcggcgcattaattcttggcttccttaataatggattgaatttgttaggtgtttcctcctattaccagatgatcgtcaaagcggtggtgattttgctggcggtgctggtagacaacaaaaagcagtaataacgactacaggacatcttgaatatgaacatgaaaaaactggctaccctggtttccgctgttgcgctaagcgccaccgtcagtgcgaatgcgatggcaaaagacaccatcgcgctggtggtctccacgcttaacaacccgttctttgtatcgctgaaagatggcgcgcagaaagaggcggataaacttggctataacctggtggtgctggactcccagaacaacccggcgaaagagctggcgaacgtgcaggacttaaccgttcgcggcacaaaaattctgctgattaacccgaccgactccgacgcagtgggtaatgctgtgaagatggctaaccaggcgaacatcccggttatcactcttgaccgccaggcaacgaaaggtgaagtggtgagccacattgcttctgataacgtactgggcggcaaaatcgctggtgattacatcgcgaagaaagcgggtgaaggtgccaaagttatcgagctgcaaggcattgctggtacatccgcagcccgtgaacgtggcgaaggcttccagcaggccgttgctgctcacaagtttaatgttcttgccagccagccagcagattttgatcgcattaaaggtttgaacgtaatgcagaacctgttgaccgctcatccggatgttcaggctgtattcgcgcagaatgatgaaatggcgctgggcgcgctgcgcgcactgcaaactgccggtaaatcggatgtgatggtcgtcggatttgacggtacaccggatggcgaaaaagcggtgaatgatggcaaactagcagcgactatcgctcagctacccgatcagattggcgcgaaaggcgtcgaaaccgcagataaagtgctgaaaggcgagaaagttcaggctaagtatccggttgatctgaaactggttgttaagcagtagttttaatcaggttgtatgacctgatggtgacataaatacgtcatcgacagatgaacgtgtaatataaagaaaagcagggcacgcgccaccctaacacggtggcgcattttatggacatcccgaatatgcaaaacgcaggcagcctcgttgttcttggcagcattaatgctgaccacattcttaatcttcaatcttttcctactccaggcgaaaccgtaaccggtaaccactatcaggttgcatttggcggcaaaggcgcgaatcaggctgtggctgctgggcgtagcggtgcgaatatcgcgtttattgcctgtacgggtgatgacagcattggtgagagcgttcgccagcagctcgccactgataacattgatattactccggtcagcgtgatcaaaggcgaatcaacaggtgtggcgctgatttttgttaatggcgaaggtgagaatgtcatcggtattcatgccggcgctaatgctgccctttccccggcgctggtggaagcgcaacgtgagcgtattgccaacgcgtcagcattattaatgcagctggaatcaccactcgaaagtgtgatggcagcggcgaaaatcgcccatcaaaataagactatcgttgcgcttaacccggctccggctcgcgaacttcctgacgaactgctggcgctggtggacattattacgccaaacgaaacggaagcagaaaagctcaccggtattcgtgttgaaaatgatgaagatgcagcgaaggcggcgcaggtactgcatgaaaaaggtatccgtactgtactgattactttaggaagtcgtggtgtatgggctagcgtgaatggtgaaggtcagcgcgttcctggattccgggtgcaggctgtcgataccattgctgccggagatacctttaacggtgcgttaatcacggcattgctggaagaaaaaccattgccagaggcgattcgttttgcccatgctgccgctgcgattgccgtaacacgtaaaggcgcacaaccttccgtaccgtggcgtgaagagatcgacgcatttttagacaggcagaggtgacgcttggctacaatgaaagatgttgcccgcctggcgggcgtttctacctcaacagtttctcacgttatcaataaagatcgcttcgtcagtgaagcgattaccgccaaagttgaagcggcgattaaagaactcaattacgcgccatcagctctggcgcgtagcctcaaactcaatcaaacacataccattggcatgttgatcactgccagtaccaatcctttctattcagaactggtgcgtggcgttgaacgcagctgcttcgaacgcggttatagtctcgtcctttgcaataccgaaggcgatgaacagcggatgaatcgcaatctggaaacgctgatgcaaaaacgcgttgatggcttgctgttactgtgcaccgaaacgcatcaaccttcgcgtgaaatcatgcaacgttatccgacagtgcctactgtgatgatggactgggctccgttcgatggcgacagcgatcttattcaggataactcgttgctgggcggagacttagcaacgcaatatctgatcgataaaggtcatacccgtatcgcctgtattaccggcccgctggataaaactccggcgcgcctgcggttggaaggttatcgggcggcgatgaaacgtgcgggtctcaacattcctgatggctatgaagtcactggtgattttgaatttaacggcgggtttgacgctatgcgccaactgctatcacatccgctgcgtcctcaggccgtctttaccggaaatgacgctatggctgttggcgtttaccaggcgttatatcaggcagagttacaggttccgcaggatatcgcggtgattggctatgacgatatcgaactggcaagctttatgacgccaccattaaccactatccaccaaccgaaagatgaactgggggagctggcgattgatgtactcatccatcggataacccagccgacccttcagcaacaacgattacaacttactccgattctgatggaacgcggttcggcttagatttacgctgtcttttgatcaaattattaccatcggttgttttcagaagcatgaacattgctgctgaagcaacagtaataatgcccattgtgataaacgtatagtggaattgttcgacagtcgttgtgccttccattccttcataaacgcgaaggacggccgcacttacagcaacgcctaaactaatcgacagttgctgcgtgaccgccagaacactgttaccgctgctggcattgtcatcggtcagatcggcaagtgtgatggtattcatcgcggtaaactgcgtcgacatagccatccctaatataaacaacggcaagatcagcatccatatagccattgctggtgattgcaaagagaactgagcgatcattagcccaataatcaccgtgatccccactaacgtatggcgatagcccagacgacgtaagacttgggtaaccatcgattttgcaataatggaacctaacgctgtcggtgccatcatacagccagcaataaacgcctgataaccaaatcctacctgtaacatcaatggcataaggaacggtacacagccggtccccagacgggttgcaatattgcctacgataccgatcgagaaagtgcgggttttaaataaatctaatgaaattaatgggtttggcgtgcgtcgtgcatggagaatatagagaagcagtaacccgatgctggtgacaattaccgtcaaggcaatccagctggcgacaatcttttccccgaatagctctattccgcttgagaagagaacaaggctgaggccaaacagcaaaaagccagtgatatcgaatctgcgtcgtgcggtggtgaaattgggcatatgtttgcgcgcgtaaagaaggcccgcaatacctatggggatattgattaaaaatatccagtgccaggttgcccaggtgaccagcacgccgccaagaacggggcctaaaattggccccaccagacccggcatggcgacaaaattcaatactggaagaagttcattacgaggataagcgcgcagtaaggccagccgagcaacaggcatcatcattgcgccgcctatcccctgaataacccggaagacaaccagctgtggtagcgaattagaaagtgcgcaggccagagaacccaatgtgaacagactcacggcaagggtaaaaatgcgacgcgtaccgaagcgatcggctagccatccgcttaccggaataagcatttattattaattcaccgtcagcgtataactgatgatggctgattgcatcgcgagaggagaacgattaaggctatgagcgattgcgggtaaggcggtattaagaatagtggcatcaagtgcctgcatgaagaaggccatcgccgcgatccacggcaaacccgccatactgcgcttctttttatcgctcattcaatgtcctgttatcgggttatcacttatcaggtgagcgtagcagcgcctgacaagctttaaatgccgcgtcgccatcgctttggataatcgcatcgacaatcgcctgatgcagatccagctttatcactgtgtcgctggtaattgacgtgaagtaagtgtgataaaccgaatggaatagcgaggcgaatgaggtcaaaaacggattggcgctcatttcatagatatgctcatgccaggccatatcgacttcgatccagcgttcacggcgaaagttctcttttaatgccgccatttcggccattaacgtattgagatgcgctttctgttccgcggtgccaaccgttgctgccagtaggcaggcttgcggctccagacagatacgcataaccagaaagtgatcgatgacctgatgaaagttctcttctgtcatccaccaggtaagcaattcctgatcaagaaaattccagttcgattgtggcatgacccgagtaccaattcgcggtcgcggtaaaaccatcccttttgccgttaacgttttgaccgcttcgcgtaccgctgtacgactcactccaaattgctcgcccagctcaatctcaccgggcaaaatggtgccgggttcatattcaccttttaagatccgttgcgccagcttctcagccagaacatacgaaaggtttttctgtgcagctaactgttgtgcgcttaaaggcattacttatcttcctttttctttttattcctccttagtatgccaccaggaagtgtgattacggttgcaaaaacggcaaattgcttgttttatggcacattaacggggcttttgctgaaaaaatgcgcggtcagaaaattattttaaatttcctcttgtcaggccggaataactccctataatgcgccaccactgacacggaacaacggcaaacacgccgccgggtcagcggggttctcctgagaactccggcagagaaagcaaaaataaatgcttgactctgtagcgggaaagcgtattatgcacaccccgcgccgctgagaaaaagcaaagcggcactgctctttaacaatttatcagacaatctgtgtgggcactcgaagatacggattcttaacgtcgcaagacgaaaaatgaataccaagtctcaagagtgaacacgtaattcattacgaagtttaattctttgagcatcaaacttttaaattgaagagtttgatcatggctcagattgaacgctggcggcaggcctaacacatgcaagtcgaacggtaacaggaaacagcttgctgtttcgctgacgagtggcggacgggtgagtaatgtctgggaaactgcctgatggagggggataactactggaaacggtagctaataccgcataacgtcgcaagaccaaagagggggaccttcgggcctcttgccatcagatgtgcccagatgggattagctagtaggtggggtaacggctcacctaggcgacgatccctagctggtctgagaggatgaccagccacactggaactgagacacggtccagactcctacgggaggcagcagtggggaatattgcacaatgggcgcaagcctgatgcagccatgccgcgtgtatgaagaaggccttcgggttgtaaagtactttcagcggggaggaagggagtaaagttaatacctttgctcattgacgttacccgcagaagaagcaccggctaactccgtgccagcagccgcggtaatacggagggtgcaagcgttaatcggaattactgggcgtaaagcgcacgcaggcggtttgttaagtcagatgtgaaatccccgggctcaacctgggaactgcatctgatactggcaagcttgagtctcgtagaggggggtagaattccaggtgtagcggtgaaatgcgtagagatctggaggaataccggtggcgaaggcggccccctggacgaagactgacgctcaggtgcgaaagcgtggggagcaaacaggattagataccctggtagtccacgccgtaaacgatgtcgacttggaggttgtgcccttgaggcgtggcttccggagctaacgcgttaagtcgaccgcctggggagtacggccgcaaggttaaaactcaaatgaattgacgggggcccgcacaagcggtggagcatgtggtttaattcgatgcaacgcgaagaaccttacctggtcttgacatccacggaagttttcagagatgagaatgtgccttcgggaaccgtgagacaggtgctgcatggctgtcgtcagctcgtgttgtgaaatgttgggttaagtcccgcaacgagcgcaacccttatcctttgttgccagcggtccggccgggaactcaaaggagactgccagtgataaactggaggaaggtggggatgacgtcaagtcatcatggcccttacgaccagggctacacacgtgctacaatggcgcatacaaagagaagcgacctcgcgagagcaagcggacctcataaagtgcgtcgtagtccggattggagtctgcaactcgactccatgaagtcggaatcgctagtaatcgtggatcagaatgccacggtgaatacgttcccgggccttgtacacaccgcccgtcacaccatgggagtgggttgcaaaagaagtaggtagcttaaccttcgggagggcgcttaccactttgtgattcatgactggggtgaagtcgtaacaaggtaaccgtaggggaacctgcggttggatcacctccttaccttaaagaagcgttctttgcagtgctcacacagattgtctgataggaagtgaaaagcaaggcgtcttgcgaagcagactgatacgtccccttcgtctagaggcccaggacaccgccctttcacggcggtaacaggggttcgaatcccctaggggacgccacttgctggtttgtgagtgaaagtcacctgccttaatatctcaaaactcatcttcgggtgatgtttgagatatttgctctttaaaaatctggatcaagctgaaaattgaaacactgaacaacgaaagttgttcgtgagtctctcaaattttcgcaacacgatgatgaatcgaaagaaacatcttcgggttgtgaggttaagcgactaagcgtacacggtggatgccctggcagtcagaggcgatgaaggacgtgctaatctgcgataagcgtcggtaaggtgatatgaaccgttataaccggcgatttccgaatggggaaacccagtgtgtttcgacacactatcattaactgaatccataggttaatgaggcgaaccgggggaactgaaacatctaagtaccccgaggaaaagaaatcaaccgagattcccccagtagcggcgagcgaacggggagcagcccagagcctgaatcagtatgtgtgttagtggaagcgtctggaaaggcgcgcgatacagggtgacagccccgtacacaaaaatgcacatattgtgagctcgatgagtagggcgggacacgtggtatcctgtctgaatatggggggaccatcctccaaggctaaatactcctgactgaccgatagtgaaccagtaccgtgagggaaaggcgaaaagaaccccggcgaggggagtgaaaaagaacctgaaaccgtgtacgtacaagcagtgggagcacgcttaggcgtgtgactgcgtaccttttgtataatgggtcagcgacttatattctgtagcaaggttaaccgaataggggagccgaagggaaaccgagtcttaactgggcgttaagttgcagggtatagacccgaaacccggtgatctagccatgggcaggttgaaggttgggtaacactaactggaggaccgaaccgactaatgttgaaaaattagcggatgacttgtggctgggggtgaaaggccaatcaaaccgggagatagctggttctccccgaaagctatttaggtagcgcctcgtgaattcatctccgggggtagagcactgtttcggcaagggggtcatcccgacttaccaacccgatgcaaactgcgaataccggagaatgttatcacgggagacacacggcgggtgctaacgtccgtcgtgaagagggaaacaacccagaccgccagctaaggtcccaaagtcatggttaagtgggaaacgatgtgggaaggcccagacagccaggatgttggcttagaagcagccatcatttaaagaaagcgtaatagctcactggtcgagtcggcctgcgcggaagatgtaacggggctaaaccatgcaccgaagctgcggcagcgacgcttatgcgttgttgggtaggggagcgttctgtaagcctgcgaaggtgtgctgtgaggcatgctggaggtatcagaagtgcgaatgctgacataagtaacgataaagcgggtgaaaagcccgctcgccggaagaccaagggttcctgtccaacgttaatcggggcagggtgagtcgacccctaaggcgaggccgaaaggcgtagtcgatgggaaacaggttaatattcctgtacttggtgttactgcgaaggggggacggagaaggctatgttggccgggcgacggttgtcccggtttaagcgtgtaggctggttttccaggcaaatccggaaaatcaaggctgaggcgtgatgacgaggcactacggtgctgaagcaacaaatgccctgcttccaggaaaagcctctaagcatcaggtaacatcaaatcgtaccccaaaccgacacaggtggtcaggtagagaataccaaggcgcttgagagaactcgggtgaaggaactaggcaaaatggtgccgtaacttcgggagaaggcacgctgatatgtaggtgaagcgacttgctcgtggagctgaaatcagtcgaagataccagctggctgcaactgtttattaaaaacacagcactgtgcaaacacgaaagtggacgtatacggtgtgacgcctgcccggtgccggaaggttaattgatggggtcagcgcaagcgaagctcttgatcgaagccccggtaaacggcggccgtaactataacggtcctaaggtagcgaaattccttgtcgggtaagttccgacctgcacgaatggcgtaatgatggccaggctgtctccacccgagactcagtgaaattgaactcgctgtgaagatgcagtgtacccgcggcaagacggaaagaccccgtgaacctttactatagcttgacactgaacattgagccttgatgtgtaggataggtgggaggctttgaagtgtggacgccagtctgcatggagccgaccttgaaataccaccctttaatgtttgatgttctaacgtggacccgtgatccgggttgcggacagtgtctggtgggtagtttgactggggcggtctcctcctaaagagtaacggaggagcacgaaggttggctaatcctggtcggacatcaggaggttagtgcaatggcataagccagcttgactgcgagcgtgacggcgcgagcaggtgcgaaagcaggtcatagtgatccggtggttctgaatggaagggccatcgctcaacggataaaaggtactccggggataacaggctgataccgcccaagagttcatatcgacggcggtgtttggcacctcgatgtcggctcatcacatcctggagctgaagtaggtcccaagggtatggctgttcgccatttaaagtggtacgcgagctgggtttagaacgtcgtgagacagttcggtccctatctgccgtgggcgctggagaactgaggggggctgctcctagtacgagaggaccggagtggacgcatcactggtgttcgggttgtcatgccaatggcactgcccggtagctaaatgcggaagagataagtgctgaaagcatctaagcacgaaacttgccccgagatgagttctccctgactccttgagagtcctgaaggaacgttgaagacgacgacgttgataggccgggtgtgtaagcgcagcgatgcgttgagctaaccggtactaatgaaccgtgaggcttaaccttacaacgccgaagatgttttggcggatgagagaagattttcagcctgatacagattaaatcagaacgcagaagcggtctgatgaaacagaatttgcctggcggccgtagcgcggtggtcccacctgaccccatgccgaactcagaagtgaaacgccgtagcgccgatggtagtgtggggtctccccatgcgagagtagggaactgccaggcatcaaattaagcagtaagccggtcataaaaccggtggttgtaaaagaattcggtggagcggtagttcagtcggttagaatacctgcctgtcacgcagggggtcgcgggttcgagtcccgtccgttccgccaccctaattaggggcgtagttcaattggtagagcaccggtctccaaaaccgggtgttgggagttcgagtctctccgcccctgccagaaatcatccttagcgaaagctaaggattttttttatctgaaataaccctctccgaagtaaatccttctaccggcatccttgccagccattcatattaatacacttcatccagcacgttaattttcaaaagatcgcgaatcaacgcatttttatcgctattttgcagccatatggcataaagcggccgtgaaagtgttgtgctatcgacaacggtatgcaggccgccttttttacgcgcccagctgacgggtagccaggtgcaaccattaagcatcgcaatctgttgctgtgccagttcagcagaactggttgtcagaatgggcacttcgtcagcaccgatcaaacctgcctcatgctgttgaaaatctggcccccactcaagtcgcagataattaagatctccctttagttttgaaggggcactggtataaagcgctaaagtgaaatatcccagcaactgactactaaattcgtccattttgggcgcttcagtggtaataagaagatcaagctggcgttcatgcagctgttttaccagagactgccgttgggcaattcgcgcttcgaactgtaagcctgtatgggcatcctgattttgatacaagcgtcccagccactgattaagcatacattcccacaacgaggcgctggcaccgatagaaaactcgttatgtcgtgaggtatgcgccacctccttacgggcggcctgccaggtgctcatgagcgtttctgcataaggcagtagtttttcaccggcagcggttaaacggatattgtttctgtggcgggtgaaaaggttcacacccagttgattttccagttgtctgattcgaaagctcactgctgactgggtcagatagagcgattcagccgctcgaccaaagtgacgcgttcggctaacttccaggaaagtttttaacaattccgtatccacagtgctctccgcaaaattatttgtcgttatgatttaaatgttttgttttacactctgtcaagcgtaactaatactccgcgccataactagctcggtcaaagaattaggagcgtgcaggatggcggaaagctttacgacgactaatcgatatttcgacaataaacattatccacgtggattctctcgtcatggtgatttcaccatcaaagaggcacaactgcttgagcgtcatggttatgccttcaatgagttggatcttggcaaacgcgagccggttaccgaggaagagaaactcttcgtagcagtatgccgtggcgaacgtgagccagtgacagaagcagaacgcgtgtggtccaagtatatgacgcgtattaagcgtccaaaacgttttcacaccctttccggcggtaaaccgcaggttgaaggtgctgaagactacaccgattctgacgattaataaaaagggcgaaatgccctttttttatgtcagtagtttctgcagatggatgagcaaacggtcaatcgctcgatagctaactgcctcctgcaaatgctgacgtgtgataatgtcagactgatcaatatcagcaatggttcgtgcaactttcaataaccgctgccaggcacgaatcgataaccccagatggatcagtgttccttccaaccacatcgcatcttcgctctcaagtttgcagaattggcgtatttccggactatccagccaggcattcagtttattctgccgcttaaattggcgctctctggcggccattacgcgttgtttaacggtggcgctgctttctcccggcactaccgttttactcaaaatgccggggggtggtaatgggatctccagtgagagatcgaagcggtcgagaaagggccccgagagccggttgagataacgtaatgtctgttctggcgtgcagcggttatggtttccctgataatgtccggtagggctgggattcatcgccgcaacaagctggaaacgggctggataggttatttttgctcgtgtgcgtgaaagatggatctgcccggattcaatcggctctcgcaaggcatccagtgtacgccgttcaaattcaggtagctcatcaagaaaaagcacgccgttatgcgccagcgaaatttcaccgggccctggaattgcgccaccgcctaccatcgcagttaacgatgcactgtgatgaggtgagcggaacgggcgctgccgccattgtttttgtactgattcagcatttaccagacttaatatcgcagcactctccagtgcctcttcattgcttaaatctggcaacaggccattaatacggctggcgagcattgttttacctgttcccggcggcccaatcagtaaaaggttgtgcccgccagcagcggtaatttccagtcctcgctttccttgttcctgaccgataacatcactgagatcatgttgtagcgcccgggatactgcatcagttggtttcgggcgttcgagagcgtgcttaccttccagaaacgcacagacagcttgcagatgatcggctatcaggcatccttcaccgttaattagccccacttcatcttcgttatctttcgcgacgataatttttctgcccgacttaatagcttcagttgcactggagattgcgccgggaacgccacgcagagcgcctgtaagcgccagttctccgactaattcatattcatctaacttattggctgtaagctgttctgaggccgccagcaacgcaatggcgataggtaaatcatatcgtcccccttcttttggcagatcagctggagccaggttgatggtgatttttttcgccggatattcatatccgctattgataatggcgctgcgcacgcgatcgcgagcttcttttaccgttgtttctggtaagcccaccatcgttaagccgggtagacctttactgatatgtacctcaacagtgatcgggggcgcatttactcccagggctgcgcgggtatgaacaattgacagtgacataagccctccttgagtcaccattatgtgcataagatatcgctgctgtagcccgctaattcgtgaattttagtggctgattcctgtttatttgtgcaagtgaagttgagttgttctggcggtggaatgatgctcgcaaaaatgcagcggacaaaggatgaactacgaggaagggaacaacattcatactgaaattgaatttttttcactcactattttatttttaaaaaacaacaatttatattgaaattattaaacgcatcataaaaatcggccaaaaaatatcttgtactatttacaaaacctatggtaactctttaggcattccttcgaacaagatgcaagaaaagacaaaatgacagcccttctacgagtgattagcctggtcgtgattagcgtggtggtgattattatcccaccgtgcggggctgcacttggacgaggaaaggcttagagatcaagccttaacgaactaagacccccgcaccgaaaggtccgggggttttttttgaccttaaaaacataaccgaggagcagacaatgaataacagcacaaaattctgtttctcaagattcaggacggggaactaactatgaatggcgcacagtgggtggtacatgcgttgcgggcacagggtgtgaacaccgttttcggttatccgggtggcgcaattatgccggtttacgatgcattgtatgacggcggcgtggagcacttgctatgccgacatgagcagggtgcggcaatggcggctatcggttatgctcgtgctaccggcaaaactggcgtatgtatcgccacgtctggtccgggcgcaaccaacctgataaccgggcttgcggacgcactgttagattccatccctgttgttgccatcaccggtcaagtgtccgcaccgtttatcggcactgacgcatttcaggaagtggatgtcctgggattgtcgttagcctgtaccaagcacagctttctggtgcagtcgctggaagagttgccgcgcatcatggctgaagcattcgacgttgcctgctcaggtcgtcctggtccggttctggtcgatatcccaaaagatatccagttagccagcggtgacctggaaccgtggttcaccaccgttgaaaacgaagtgactttcccacatgccgaagttgagcaagcgcgccagatgctggcaaaagcgcaaaaaccgatgctgtacgttggcggtggcgtgggtatggcgcaggcagttccggctttgcgtgaatttctcgctgccacaaaaatgcctgccacctgtacgctgaaagggctgggcgcagtagaagcagattatccgtactatctgggcatgctggggatgcacggcaccaaagcggcaaacttcgcggtgcaggagtgtgacctgctgatcgccgtgggcgcacgttttgatgaccgggtgaccggcaaactgaacaccttcgcgccacacgccagtgttatccatatggatatcgacccggcagaaatgaacaagctgcgtcaggcacatgtggcattacaaggtgatttaaatgctctgttaccagcattacagcagccgttaaatcaatgactggcagcaacactgcgcgcagctgcgtgatgaacattcctggcgttacgaccatcccggtgacgctatctacgcgccgttgttgttaaaacaactgtcggatcgtaaacctgcggattgcgtcgtgaccacagatgtggggcagcaccagatgtgggctgcgcagcacatcgcccacactcgcccggaaaatttcatcacctccagcggtttaggtaccatgggttttggtttaccggcggcggttggcgcacaagtcgcgcgaccgaacgataccgttgtctgtatctccggtgacggctctttcatgatgaatgtgcaagagctgggcaccgtaaaacgcaagcagttaccgttgaaaatcgtcttactcgataaccaacggttagggatggttcgacaatggcagcaactgttttttcaggaacgatacagcgaaaccacccttactgataaccccgatttcctcatgttagccagcgccttcggcatccatggccaacacatcacccggaaagaccaggttgaagcggcactcgacaccatgctgaacagtgatgggccatacctgcttcatgtctcaatcgacgaacttgagaacgtctggccgctggtgccgcctggcgccagtaattcagaaatgttggagaaattatcatgatgcaacatcaggtcaatgtatcggctcgcttcaatccagaaaccttagaacgtgttttacgcgtggtgcgtcatcgtggtttccacgtctgctcaatgaatatggccgccgccagcgatgcacaaaatataaatatcgaattgaccgttgccagcccacggtcggtcgacttactgtttagtcagttaaataaactggtggacgtcgcacacgttgccatctgccagagcacaaccacatcacaacaaatccgcgcctgagcgcaaaaggaatataaaaatgaccacgaagaaagctgattacatttggttcaatggggagatggttcgctgggaagacgcgaaggtgcatgtgatgtcgcacgcgctgcactatggcacttcggtttttgaaggcatccgttgctacgactcgcacaaaggaccggttgtattccgccatcgtgagcatatgcagcgtctgcatgactccgccaaaatctatcgcttcccggtttcgcagagcattgatgagctgatggaagcttgtcgtgacgtgatccgcaaaaacaatctcaccagcgcctatatccgtccgctgatcttcgtcggtgatgttggcatgggagtaaacccgccagcgggatactcaaccgacgtgattatcgctgctttcccgtggggagcgtatctgggcgcagaagcgctggagcaggggatcgatgcgatggtttcctcctggaaccgcgcagcaccaaacaccatcccgacggcggcaaaagccggtggtaactacctctcttccctgctggtgggtagcgaagcgcgccgccacggttatcaggaaggtatcgcgctggatgtgaacggttatatctctgaaggcgcaggcgaaaacctgtttgaagtgaaagatggtgtgctgttcaccccaccgttcacctcctccgcgctgccgggtattacccgtgatgccatcatcaaactggcgaaagagctgggaattgaagtacgtgagcaggtgctgtcgcgcgaatccctgtacctggcggatgaagtgtttatgtccggtacggcggcagaaatcacgccagtgcgcagcgtagacggtattcaggttggcgaaggccgttgtggcccggttaccaaacgcattcagcaagccttcttcggcctcttcactggcgaaaccgaagataaatggggctggttagatcaagttaatcaataaatacaaaaaatgggacggcacgcaccgtcccatttacgagacagacactgggagtaaataaagtatgcctaagtaccgttccgccaccaccactcatggtcgtaatatggcgggtgctcgtgcgctgtggcgcgccaccggaatgaccgacgccgatttcggtaagccgattatcgcggttgtgaactcgttcacccaatttgtaccgggtcacgtccatctgcgcgatctcggtaaactggtcgccgaacaaattgaagcggctggcggcgttgccaaagagttcaacaccattgcggtggatgatgggattgccatgggccacggggggatgctttattcactgccatctcgcgaactgatcgctgattccgttgagtatatggtcaacgcccactgcgccgacgccatggtctgcatctctaactgcgacaaaatcaccccggggatgctgatggcttccctgcgcctgaatattccggtgatctttgtttccggcggcccgatggaggccgggaaaaccaaactttccgatcagatcatcaagctcgatctggttgatgcgatgatccagggcgcagacccgaaagtatctgactcccagagcgatcaggttgaacgttccgcgtgtccgacctgcggttcctgctccgggatgtttaccgctaactcaatgaactgcctgaccgaagcgctgggcctgtcgcagccgggcaacggctcgctgctggcaacccacgccgaccgtaagcagctgttccttaatgctggtaaacgcattgttgaattgaccaaacgttattacgagcaaaacgacgaaagtgcactgccgcgtaatatcgccagtaaggcggcgtttgaaaacgccatgacgctggatatcgcgatgggtggatcgactaacaccgtacttcacctgctggcggcggcgcaggaagcggaaatcgacttcaccatgagtgatatcgataagctttcccgcaaggttccacagctgtgtaaagttgcgccgagcacccagaaataccatatggaagatgttcaccgtgctggtggtgttatcggtattctcggcgaactggatcgcgcggggttactgaaccgtgatgtgaaaaacgtacttggcctgacgttgccgcaaacgctggaacaatacgacgttatgctgacccaggatgacgcggtaaaaaatatgttccgcgcaggtcctgcaggcattcgtaccacacaggcattctcgcaagattgccgttgggatacgctggacgacgatcgcgccaatggctgtatccgctcgctggaacacgcctacagcaaagacggcggcctggcggtgctctacggtaactttgcggaaaacggctgcatcgtgaaaacggcaggcgtcgatgacagcatcctcaaattcaccggcccggcgaaagtgtacgaaagccaggacgatgcggtagaagcgattctcggcggtaaagttgtcgccggagatgtggtagtaattcgctatgaaggcccgaaaggcggtccggggatgcaggaaatgctctacccaaccagcttcctgaaatcaatgggtctcggcaaagcctgtgcgctgatcaccgacggtcgtttctctggtggcacctctggtctttccatcggccacgtctcaccggaagcggcaagcggcggcagcattggcctgattgaagatggtgacctgatcgctatcgacatcccgaaccgtggcattcagttacaggtaagcgatgccgaactggcggcgcgtcgtgaagcgcaggacgctcgaggtgacaaagcctggacgccgaaaaatcgtgaacgtcaggtctcctttgccctgcgtgcttatgccagcctggcaaccagcgccgacaaaggcgcggtgcgcgataaatcgaaactggggggttaataatggctgactcgcaacccctgtccggtgctccggaaggtgccgaatatttaagagcagtgctgcgcgcgccggtttacgaggcggcgcaggttacgccgctacaaaaaatggaaaaactgtcgtcgcgtcttgataacgtcattctggtgaagcgcgaagatcgccagccagtgcacagctttaagctgcgcggcgcatacgccatgatggcgggcctgacggaagaacagaaagcgcacggcgtgatcactgcttctgcgggtaaccacgcgcagggcgtcgcgttttcttctgcgcggttaggcgtgaaggccctgatcgttatgccaaccgccaccgccgacatcaaagtcgacgcggtgcgcggcttcggcggcgaagtgctgctccacggcgcgaactttgatgaagcgaaagccaaagcgatcgaactgtcacagcagcaggggttcacctgggtgccgccgttcgaccatccgatggtgattgccgggcaaggcacgctggcgctggaactgctccagcaggacgcccatctcgaccgcgtatttgtgccagtcggcggcggcggtctggctgctggcgtggcggtgctgatcaaacaactgatgccgcaaatcaaagtgatcgccgtagaagcggaagactccgcctgcctgaaagcagcgctggatgcgggtcatccggttgatctgccgcgcgtagggctatttgctgaaggcgtagcggtaaaacgcatcggtgacgaaaccttccgtttatgccaggagtatctcgacgacatcatcaccgtcgatagcgatgcgatctgtgcggcgatgaaggatttattcgaagatgtgcgcgcggtggcggaaccctctggcgcgctggcgctggcgggaatgaaaaaatatatcgccctgcacaacattcgcggcgaacggctggcgcatattctttccggtgccaacgtgaacttccacggcctgcgctacgtctcagaacgctgcgaactgggcgaacagcgtgaagcgttgttggcggtgaccattccggaagaaaaaggcagcttcctcaaattctgccaactgcttggcgggcgttcggtcaccgagttcaactaccgttttgccgatgccaaaaacgcctgcatctttgtcggtgtgcgcctgagccgcggcctcgaagagcgcaaagaaattttgcagatgctcaacgacggcggctacagcgtggttgatctctccgacgacgaaatggcgaagctacacgtgcgctatatggtcggcggacgtccatcgcatccgttgcaggaacgcctctacagcttcgaattcccggaatcaccgggcgcgctgctgcgcttcctcaacacgctgggtacgtactggaacatttctttgttccactatcgcagccatggcaccgactacgggcgcgtactggcggcgttcgaacttggcgaccatgaaccggatttcgaaacccggctgaatgagctgggctacgattgccacgacgaaaccaataacccggcgttcaggttctttttggcgggttagggaaaaatgcctgatagcgcttcgcttatcaggcctacccgcgcgacaacgtcatttgtggttcggcaaaatcttccagaatgcctcaattagcggctcatgtagccgctttttctgcgcacacacgcccagctcaaacggcgttttctcatcgctgcgctctaaaatcatcacgcggttacgcaccggttcggggctgttttccagcaccacttccggcaacaatgccacgccacagccgagtgccaccatcgataccatcgcttcatgcccgccaaccgtggcgtaaatcatcgggttactgattttattgcgtcgaaaccacagttcaatgcggcggcgtaccggcccctgatcggccataataaacggcaccgttgaccagtccggcttctctaccgacacctgattacgcaccgggcagggcagcgcgggggcaatcagcactactgccagattctccagcatcgaaaacgccactgcgccgggcaaggtttccggtttacccgcaatcgccagatccgcttcaccagtgaccaccttttccatcgcatctgccgcatcaccagtagtaagtttaatctccaccgacgggtgttccgcgcggaagcgatccagaatcggcggcagatggctgtaggcagcggtcaccgagcagaagatatgtaattcgccagagagcgacggcccttgctgatcgatggtgtggcgcaactgctgatactgcaacagcgtttgctgggcgaaaacgcgcagctcttcgcccgcttcagtcagcgtcaccgtgcggttatcgcgcacaaacagcggctgaccgagatcttcttccaggcgctgaatctgccgtgagagcgtggatgggctaacgtgcatcgcccgcgcgctgcggccaaaatggcggctttccgccagatgcaggaaggttttcagatcgcgtaaatccacagggacagccctcgatgttgacgttgcaaaaattgcaatgtgacgttgtgaatatatcaatttccgcaataaatttcctgtcatatagtgaattcaatctcgcaaacgcgaaccgaacaataagaagcacaacatcacgaggaatcaccatggctaactacttcaatacactgaatctgcgccagcagctggcacagctgggcaaatgtcgctttatgggccgcgatgaattcgccgatggcgcgagctaccttcagggtaaaaaagtagtcatcgtcggctgtggcgcacagggtctgaaccagggcctgaacatgcgtgattctggtctcgatatctcctacgctctgcgtaaagaagcgattgccgagaagcgcgcgtcctggcgtaaagcgaccgaaaatggttttaaagtgggtacttacgaagaactgatcccacaggcggatctggtgattaacctgacgccggacaagcagcactctgatgtagtgcgcaccgtacagccactgatgaaagacggcgcggcgctgggctactcgcacggtttcaacatcgtcgaagtgggcgagcagatccgtaaagatatcaccgtagtgatggttgcgccgaaatgcccaggcaccgaagtgcgtgaagagtacaaacgtgggttcggcgtaccgacgctgattgccgttcacccggaaaacgatccgaaaggcgaaggcatggcgattgccaaagcctgggcggctgcaaccggtggtcaccgtgcgggtgtgctggaatcgtccttcgttgcggaagtgaaatctgacctgatgggcgagcaaaccatcctgtgcggtatgttgcaggctggctctctgctgtgcttcgacaagctggtggaagaaggtaccgatccagcatacgcagaaaaactgattcagttcggttgggaaaccatcaccgaagcactgaaacagggcggcatcaccctgatgatggaccgtctctctaacccggcgaaactgcgtgcttatgcgctttctgaacagctgaaagagatcatggcacccctgttccagaaacatatggacgacatcatctccggcgaattctcttccggtatgatggcggactgggccaacgatgataagaaactgctgacctggcgtgaagagaccggcaaaaccgcgtttgaaaccgcgccgcagtatgaaggcaaaatcggcgagcaggagtacttcgataaaggcgtactgatgattgcgatggtgaaagcgggcgttgaactggcgttcgaaaccatggtcgattccggcatcattgaagagtctgcatattatgaatcactgcacgagctgccgctgattgccaacaccatcgcccgtaagcgtctgtacgaaatgaacgtggttatctctgataccgctgagtacggtaactatctgttctcttacgcttgtgtgccgttgctgaaaccgtttatggcagagctgcaaccgggcgacctgggtaaagctattccggaaggcgcggtagataacgggcaactgcgtgatgtgaacgaagcgattcgcagccatgcgattgagcaggtaggtaagaaactgcgcggctatatgacagatatgaaacgtattgctgttgcgggttaagtgcgcgctgatgccctcaccccgaccctctcccacagggagagggagaaaacactcaaggccttctcctggagaaggccttgctattagttgcggtacagcaccttaatgatgtgatatccgaactgggtgtgcagcgggccggtcggctccagtaccggacaagagaaaaccactttatcgaacgccggaaccatctgaccctggcggaattcacctaaatcaccgccgcgtttgcctgatgggcaaatggagtgtttcttcgccagcttgccgaaatcggccccgttcttaatctgctcgagaagatccagagccagtttctcttcttttacaaggatatgcagtgctgctgctgtttttgccatgatcgtgccttgagtgaataattgtcaggcggcgattttagcatgatccgcagatgctaacgtaattgtcagtcagggagtggctggtacatatatggcaaaagcccggaaaatccgggcttcgcaggtccctcaaggggagaaaacttagggcctctatgggctacaaagtcattatcggggatggttattttattgtcaatttatgagcgatatggcattgattgacttgatgaccgccctctgtatgtctgcaaccaactcatgtggcaaacattgattaagataccctctgtaagtccttgctctgtttaatctgtttcgactgacttgttgtaccaggtcggctttggcccaacgaatctgctgatcaaagaattgcaggtcattgataacattactggctatttcaacatgcattccacgttttaacttgtctggtcgcgagtggttgataatggaacgacgatgcatgcgttgccattaatttttccgttgagcacgacaactaacctgttttttatcatttcaggaggaatgcggccatcgtaatacgtcgtgctgaacggtccattttggctaacaggatagttaccaaagttgcattccagtatttcaccaaccttagggctgaaattaatcgccacgagtaaacctctccttagtaaactctgaaaaagtaataacacaacgttacgacccgatattttctaagtctaatggattcacgatgaactccgatttcggtcttctctctctgatttaaacatccgcagccaaccggttagcggcttacacgcggtcacattcaaatgcgattctgctacaatcctccccccgttcgaagattgagcaatacacctatgcgtctaaaccccggccaacaacaagctgtcgaattcgttaccggcccctgcctggtgctggcgggcgcgggttccggtaaaactcgtgttatcaccaataaaatcgcccatctgatccgcggttgcggttatcaggcgcggcacattgcggcggtgacctttactaataaagcagcgcgcgagatgaaagagcgtgtagggcagacgctggggcgcaaagaggcgcgtgggctgatgatctccactttccatacgttggggctggatatcatcaaacgcgagtatgcggcgcttgggatgaaagcgaacttctcgttgtttgacgataccgatcagcttgctttgcttaaagagttgaccgaggggctgattgaagatgacaaagttctcctgcaacaactgatttcgaccatctctaactggaagaatgatctcaaaacaccgtcccaggcggcagcaagtgcgattggcgagcgggaccgtatttttgcccattgttatgggctgtatgatgcacacctgaaagcctgtaacgttctcgacttcgatgatctgattttattgccgacgttgctgctgcaacgcaatgaagaagtccgcaagcgctggcagaacaaaattcgctatctgctggtggatgagtatcaggacaccaacaccagccagtatgagctggtgaaactgctggtgggcagccgcgcgcgctttaccgtggtgggtgacgatgaccagtcgatctactcctggcgcggtgcacgtccgcaaaacctggtgctgctgagtcaggattttccggcgctgaaggtgattaagcttgagcagaactatcgctcttccgggcgtattctgaaagcggcgaacatcctgatcgccaataacccgcacgtctttgaaaagcgtctgttctccgaactgggttatggcgcggagctaaaagtattaagcgcgaataacgaagaacatgaggctgagcgcgttactggcgagctgatcgcccatcacttcgtcaataaaacgcagtacaaagattacgccattctttatcgcggtaaccatcagtcgcgggtgtttgaaaaattcctgatgcaaaaccgcatcccgtacaaaatatctggtggtacgtcgtttttctctcgtcctgaaatcaaggacttgctggcttatctgcgcgtgctgactaacccggacgatgacagcgcatttctgcgtatcgttaacacgccgaagcgagagattggcccggctacgctgaaaaagctgggtgagtgggcgatgacgcgcaataaaagcatgtttaccgccagctttgatatgggcctgagtcagacgcttagcggacgtggttatgaagcattgacccgcttcactcactggttggcagaaatccagcgtctggcggagcgggagccgattgccgcggtgcgtgatctgatccatggcatggattatgaatcctggctgtacgaaacatcgcccagcccgaaagccgccgaaatgcgcatgaagaacgtcaaccaactgtttagctggatgacggagatgctggaaggcagtgaactggatgagccgatgacgctcacccaggtggtgacgcgctttactttgcgcgacatgatggagcgtggtgagagtgaagaagagctggatcaggtgcaactgatgactctccacgcgtcgaaagggctggagtttccttatgtctacatggtcggtatggaagaagggtttttgccgcaccagagcagcatcgatgaagataatatcgatgaggagcggcggctggcctatgtcggcattacccgcgcccagaaggaattgacctttacgctgtgtaaagaacgccgtcagtacggcgaactggtgcgcccggagccgagccgctttttgctggagctgccgcaggatgatctgatttgggaacaggagcgcaaagtggtcagcgccgaagaacggatgcagaaagggcaaagccatctggcgaatctgaaagcgatgatggcggcaaaacgagggaaataatcaaggccggaaaagatgcgtcagcatcgcatccggcacttactcattaatgcacttccagcggccagtggacatagctctgccactggctttcctgagcaataatctctttacccagcggatgttgggttagccaaccttgcggaagcgtcaaggtcaacagttcatggttagcctgtaatgtcatctctggcacgagatcgtcacggcgacggctggcaaaaatgatggccaggcgtagtaaacggcagagttgttctgcgacgcgcggcggtacggcattttgctgatgcagcgatgagagatcgaccggattagtctggttgagcagtagcgtcgccagcaattttttctgtgcgggggtaaaaccgggaagatccagattacgcaccagataagcagcgtgttgcggcgcttgtttgaagtcaacgctcaggccgatttcatgaagctgacaggcgctgatgagcaaatcgcggcttattgcttcaagatgccattcgttttccacctgatcgaagaagttagccgcaactttggctacgcgctgtgcctgatcaatatcgatcataaagcggcgttgaatattacgcagcgtacggctgcgaatatcctgctcgacggccagatgcaacatgccgtagaccaggccttcacgcagcgcaccgcccgccagggtcatacactgaatattcagttcggtaaaaatggcgatcaggatcgccagaccactcgggaacactaacgcacgttccagcgtcagcccgtcaatctccagttcctccagccgaccgcaatgaatggctcgctgtttcaattgctgcaacttttccagggtaatgcgttcatccatcccctgtgccatcatgatttcctgtaacgcctgcacggtgccggaagcaccaacgcacactttccagccgtgataccgtaattcatcggcaaccggacgtaacacttcgcgtgccgctttttctgcagcatcaaaattttcctgccccagattacgatcggcaaaatagcgttccagccaggtgacgcagcccatcgacaggctgaacaacgaggtggtttgtgcacccgtgccggttaccagttcagtactggctccgcctatatccaccaccaggcgctgatcggcaccaccagtggtgtgagcaacgccctgataaatcagacgtgcttcctcttcaccgctgatcacctgtaccggacaaccgagaatttcctgcgctttggcaataaaatcacccgcattgacggcaaggcgtaacgtcgccgtagcgacaacgcgaatttgcgagggaggaatatcttgcagacgttcagcaaacaggcgcaaacattgccaaccgcgctccattgcttcattggagagggcattttcgctattcaggccagcagccagacgcactttgcgttttattcgcgtcagcgtctggatgcttccagccacctcgcgcacaaccagcatatgaaaactattcgaaccgagatcaatggctgcatacagcgacgaggtggaacccatactcttcatccttcaatctgtctctgtgttggctgcattctttcacctgaatcacttactacagtaagctcatcgggattcattctcttgccatcttgatacagtttgaatgattttgagtatgacattttttatttaacctgaacgacgacgattacgcggagcgccagtacgacgcggaccattgcctgtgcgcgggcgcgtgaggcgcagcggttttggcagatcggtcatcaatgcgtccggattgtatttgcttaccggaattgagtgaccaatataggtctcaatagcaggcaaattcaatgcatactcttcacacgccaggctgatagagtgaccgcttgcgcctgcgcgacctgtacgaccaatacggtgaacgtaatcttcacagtcatcgggtaaatcgtagttaaagacgtgcgtcactgccggaatatgcaaaccacgcgcggcaacgtcggtggcaaccagaatatccagatcgccacgggtaaattcatcaagaatacgcagacgttttttctgcgcgacatcgcctgtcaataaaccgacacgatgaccatctgctgccaggtggccccagatctcttcacaacggtgtttggtgttggcgaaaataatcgctctgtctggccactcttcttcgatcagcgtttgcagcaaacgcattttttcttcgttagaagggtagaaaagctcttctttaatacggtggcccgttttctgttccggttccacttcaatatattcggcattgttcatctgctcgaacgccagttcacgtacccggtacgaaagcgtggcggagaacagcatgttgaggcgctggtttgcaggcggcatacggcggaacagccagcggatatctttaataaagcccagatcgtacatgcgatcggcttcgtccagtaccaccacctgaatggcaccgaggttaatgtggttctgcttggcgtagtcaattaaacgccccgtggtgccaatcagaatgtcaacgccgctttccagcactttcagctgtttgtcgtagccatcaccaccgtaagccagacccagcttcaggccagtagcttccgccagcggttctgcgtcggcatggatctgcacggcaagttcacgcgtcggtgccataattaaggcacgcggctgattcaccttgcgatcggcaatcgcaggatgagagagaagataatgaaacgttgacgtaagaaacgccatcgttttcccggtaccggtttgcgcctgcccggctacgtcacgacccgccagcgtcagcggaagggccagtgcctgaatgggcgtacagttatgaaacccttttttttcaagggcttctacaaccttcggatgcagggcgaagtcggaaaacttctgttctgttaaatgtgttttgctcatagtgtggtagaatatcagcttactattgctttacgaaagcgtatccggtgaaataaagtcaacctttagttggttaatgttacaccaacaacgaaaccaacacgccaggcttattcctgtggagttatatatgagcgataaaattattcacctgactgacgacagttttgacacggatgtactcaaagcggacggggcgatcctcgtcgatttctgggcagagtggtgcggtccgtgcaaaatgatcgccccgattctggatgaaatcgctgacgaatatcagggcaaactgaccgttgcaaaactgaacatcgatcaaaaccctggcactgcgccgaaatatggcatccgtggtatcccgactctgctgctgttcaaaaacggtgaagtggcggcaaccaaagtgggtgcactgtctaaaggtcagttgaaagagttcctcgacgctaacctggcgtaagggaatttcatgttcgggtgccccgtcgctaaaaactggacgcccggcgtgagtcatgctaacttagtgttgacttcgtattaaacataccttattaagtttgaatcttgtaatttccaacgcttcccgttttatcttaaatgcgaagtgaacagatttctggctcgtcactcaatccgtcttgtcgtttcagttctgcgtactctcctgtgaccaggcagcgaaaagacatgagtcgatgaccgtaaacaggcatggatgatcctgccataccattcacaacattaagttcgagatttaccccaagtttaagaactcacaccactatgaatcttaccgaattaaagaatacgccggtttctgagctgatcactctcggcgaaaatatggggctggaaaacctggctcgtatgcgtaagcaggacattatttttgccatcctgaagcagcacgcaaagagtggcgaagatatctttggtgatggcgtactggagatattgcaggatggatttggtttcctccgttccgcagacagctcctacctcgccggtcctgatgacatctacgtttcccctagccaaatccgccgtttcaacctccgcactggtgataccatctctggtaagattcgcccgccgaaagaaggtgaacgctattttgcgctgctgaaagttaacgaagttaacttcgacaaacctgaaaacgcccgcaacaaaatcctctttgagaacttaaccccgctgcacgcaaactctcgtctgcgtatggaacgtggtaacggttctactgaagatttaactgctcgcgtactggatctggcatcacctatcggtcgtggtcagcgtggtctgattgtggcaccgccgaaagccggtaaaaccatgctgctgcagaacattgctcagagcattgcttacaaccacccggattgtgtgctgatggttctgctgatcgacgaacgtccggaagaagtaaccgagatgcagcgtctggtaaaaggtgaagttgttgcttctacctttgacgaacccgcatctcgccacgttcaggttgcggaaatggtgatcgagaaggccaaacgcctggttgagcacaagaaagacgttatcattctgctcgactccatcactcgtctggcgcgcgcttacaacaccgttgttccggcgtcaggtaaagtgttgaccggtggtgtggatgccaacgccctgcatcgtccgaaacgcttctttggtgcggcgcgtaacgtggaagagggcggcagcctgaccattatcgcgacggcgcttatcgataccggttctaaaatggacgaagttatctacgaagagtttaaaggtacaggcaacatggaactgcacctctctcgtaagatcgctgaaaaacgcgtcttcccggctatcgactacaaccgttctggtacccgtaaagaagagctgctcacgactcaggaagaactgcagaaaatgtggatcctgcgcaaaatcattcacccgatgggcgaaatcgatgcaatggaattcctcattaataaactggcaatgaccaagaccaatgacgatttcttcgaaatgatgaaacgctcataaatttgtcttatgccaaaaacgccacgtgtttacgtggcgttttgcttttatatctgtaatcttaatgccgcgctggcgatgttaggaaaattcctggaatttgctggcatgttatgcaatttgcatatcaaatggttaatttttgcacaggactggtgggtttggaacggactttcccttctgaataaaggtcttcgtggttatacttctgctaataattttctctgagagcatgcattgtgaatttactgacagtgagtactgatctcatcagtatttttttattcacgacactgtttctgttttttgcccgtaaggtggcaaaaaaagtcggtttagtggataaaccaaacttccgcaaacgtcaccagggattgatacctctcgttggggggatttcggtttacgcagggatttgcttcacgttcggaattgtcgattactatattccgcatgcatctctctatctcgcttgtgccggtgtgcttgttttcattggcgcgctggatgaccgttttgatatcagcgtaaaaatccgtgccaccatacaggccgctgttggcattgttatgatggtgttcggcaagctttatctcagtagcctgggttatatctttggctcctgggagatggtgctcggaccgtttggttacttcctgacgctatttgccgtctgggcggccattaatgcgttcaacatggttgatggcattgatggcttgctgggcgggttgtcctgcgtctcgtttgcagcaatcggtatgattttgtggttcgacgggcaaaccagcctcgcaatctggtgctttgcgatgatcgccgccatcctgccatacatcatgcttaaccttggtatcctgggtcgccgctacaaagtctttatgggtgatgcgggcagtacgctgattggttttaccgttatctggatcctgctcgaaacgacccagggcaaaacccatcccatcagcccggttaccgctttgtggataatcgccattccgctaatggatatggtggcgattatgtaccgtcgcctgcgtaaaggcatgagcccattctctcctgaccgtcagcatattcaccatttgatcatgcgtgccgggtttacttcccgtcaggcgtttgtgctgattacccttgccgcagcactgctcgcttccattggcgtgctggcagaatattctcattttgtcccggagtgggtcatgctggtgctctttttgctagcattcttcctctatggatattgcattaagcgtgcctggaaagttgctcgctttattaagcgcgtaaaacgcagactgcgtagaaatcgtggtggcagccccaatttaaccaaataaatgaggatgtgatgacacaaccaatgcctgggaaaccggccgaagacgctgaaaatgaactggatattcgtgggttgtttcgtaccttgtgggctgggaagctatggattattggcatggggctggcgtttgcgttaatcgcgctggcgtatacgttttttgctcgtcaggagtggagctcgacggcgattaccgatcgtccaacggtgaatatgctggggggatattactcgcagcagcaatttttgcgtaacctggatgtccgttcaaacatggcttctgccgaccaaccatcggtcatggacgaagcctataaagagtttgttatgcaactggcctcgtgggatacccgcagagagttctggctgcaaaccgactattacaaacagcggatggtgggcaacagcaaagccgatgcggcgttgctggatgaaatgattaacaacatccagtttatccccggagactttacccgcgcggtcaatgacagcgtgaagcttattgccgaaaccgcgcctgacgctaataacctgttacgtcagtatgttgcttttgccagccagcgtgcagccagccatctgaatgatgagctgaaaggcgcatgggcggcgcgtaccatccagatgaaagctcaggtgaagcgtcaggaagaggtggcgaaagccatctacgaccgccggatgaacagcattgagcaggcgctgaaaattgctgagcagcataatatttcgcgcagtgcgacagatgtacctgccgaggaattacctgattcagaaatgttcctgcttgggcgtccaatgcttcaggctcgactggaaaatttacaggccgtcggtccggcctttgatctcgactatgatcagaatcgggccatgttaaacaccctgaatgttggtccaaccctggatccgcgttttcagacctatcgctatttgcgtacgccggaagaaccggtaaaacgcgatagcccacgtcgtgccttcctgatgattatgtggggcattgtcggggggctgatcggggctggtgtcgcattaacccgccgttgctcgaaatagcaacactgctgcggtgagcgcaaaggcgctcgccgcttattcgaagagaatcgatgtgaaagtactgactgtatttggtacgcgcccggaagccatcaagatggcgccgttggtgcatgcgttggcaaaagatcctttttttgaggctaaagtttgcgtcactgcgcagcatcgggagatgctcgatcaggtgctgaaactcttttccattgtacctgactacgatctcaacataatgcagccaggacagggcctgacagagataacctgtcggattctggaagggctaaaacctattcttgccgagttcaaaccagacgtcgtgctggttcacggcgatacgacgacgacgctggcaaccagcctggcggcgttttatcagcgtattcctgttggtcacgttgaggctggtctgcgcacgggcgatctctattcgccgtggccggaagaggctaaccgtacattgaccgggcatctggcgatgtatcacttctctccaaccgaaacttcccggcaaaacttgctgcgtgaaaacgttgcggatagccgaatcttcattaccggtaatacagtcattgatgcactgttatgggtgcgtgaccaggtgatgagcagcgacaagctgcgttcagaactggcggcaaattacccgtttatcgaccccgataaaaagatgattctggtgaccggtcacaggcgtgagagtttcggtcgtggctttgaagaaatctgccacgcgctggcagacatcgccaccacgcaccaggacatccagattgtctatccggtgcatctcaacccgaacgtcagagaaccggtcaatcgcattctggggcatgtgaaaaatgtcattctgatcgatccccaggagtatttaccgtttgtctggctgatgaaccacgcctggctgattttgaccgactcaggcggcattcaggaagaagcgccttcgctggggaaacctgtgctggtgatgcgcgataccactgagcgtccggaagcggtgacggcgggtacggtgcgtctggtaggcacggataagcagcgaattgtcgaggaagtgacgcgtcttttaaaagacgaaaacgaatatcaagctatgagccgcgcccataacccgtatggtgatggtcaggcatgctctcgcattctggaagcgttaaaaaataatcggatatcactatgagttttgcgaccatttctgttatcggactgggttatatcgggctgccaacggcagcagcgtttgcctcacggcaaaaacaggtaattggtgtcgatatcaaccaacatgcggttgataccatcaatcgtggcgaaatccatatcgtcgaacctgatttggcgagtgtagtaaaaactgccgtagaaggcggttttttacgagcgagcacgacgccagttgaagcggatgcctggctgattgctgtacccacgccgtttaagggcgatcatgagccagatatgacctacgttgaatcggctgctcgctccattgcgccagtgctgaaaaaaggcgcgctggtgatccttgaatccacctcgccggtggggtcaaccgagaagatggcagaatggttagcagagatgcgtccggatctcactttcccgcagcaggtgggcgagcaggcggacgtcaacattgcttactgcccggaacgcgtgttaccaggacaggtaatggtcgagctgattaaaaacgatcgcgtgattggtggtatgacgccggtttgttcggcccgcgccagcgaactgtacaaaattttcctcgaaggtgagtgtgtcgtcactaactcgcggacggcggaaatgtgtaagctcaccgaaaacagcttccgcgatgtgaatatcgcttttgctaatgaattgtcgctgatttgtgccgatcaggggattaacgtctgggaactgattcgcctggcgaatcgtcaccctcgcgttaatattcttcagcctggccctggcgtgggcggtcactgcattgctgttgatccgtggtttatcgtggcacagaacccccagcaggcgcggcttatccgtaccgcgcgcgaagtgaacgatcacaaaccgttctgggttatcgatcaggtgaaagcggcggtggctgattgcctggcggctaccgataaacgcgccagtgaactgaaaatcgcctgctttggtctggcgtttaaaccgaatattgatgacctgcgcgaaagcccggcgatggaaatcgctgaactgatcgcccagtggcatagcggcgaaactctggttgttgagcctaacatccaccagttgccgaaaaaactgaccgggctttgtactctggcgcagcttgacgaggcgctggcaacggcagacgtgctggtgatgctggtcgatcatagtcagttcaaagttatcaatggcgacaatgtccatcagcagtatgtcgtcgatgccaaaggagtctggcgctgatgagaaaaattctgataacaggtggtgccgggtttattggctcggcgctggtgcgttatatcatcaacgaaacgagcgacgcggtggtagtggtcgataagctgacctacgccggaaacctgatgtcgctggcaccggtcgcgcaaagcgagcgctttgcctttgagaaagttgatatctgcgatcgggcagaactggcacgcgtattcactgagcatcagccagactgtgtcatgcatctggcagccgaaagccatgttgaccgttctattgacggcccggcagcgtttattgaaaccaacattgtcgggacttatacattgcttgaagcggcgcgggcttactggaatgcgctgacggaagataaaaaatcagcgttccgttttcatcatatctccactgacgaagtatatggtgacctgcactcgacggatgatttcttcaccgaaaccacgccgtatgcgccgagcagcccttattccgcgtcaaaagccagcagcgaccatctggtgcgcgcctggctgcggacctatggtctgccgacgcttatcaccaactgctcgaataactacggcccttaccactttccggaaaaactgatcccgctgatgatcctcaacgcgctggcgggtaaatcgctgccggtatatggcaacgggcagcaaatccgtgactggctgtatgtggaagatcacgcccgcgcgctgtattgcgtggcgaccaccgggaaagtcggtgaaacctataatattggtggtcacaacgagcgtaagaatctcgatgttgtggaaaccatttgcgagctgctggaagaactggctccgaacaagccgcacggcgtggcgcactatcgtgacctgatcacctttgtcgctgaccgtccggggcatgatctgcgttatgccattgatgcttcgaaaattgcccgtgaacttggctggctgccgcaggaaacctttgaaagtggaatgcgtaaaacggttcagtggtatctggctaatgaaagctggtggaagcaggtgcaggacggcagctatcagggcgagcgtttaggtctgaaaggctaattttcagcggaggcaaacatgaaaggtattatcctggcgggcggttccggcacccgattgcatccgattacgcgcggcgtatcgaagcaactgttgccgatttacgataagccaatgatttactatccgctgtcggtgctgatgctggccggtatccgcgaaattctcatcatcactacgccggaagataaaggttatttccagcgcctgctgggcgatggtagtgagttcggtatccagctggaatatgccgaacagcccagcccggacggtctggcgcaggcctttatcatcggtgaaaccttccttaatggtgaaccttcttgtctggtgctgggcgataacatcttcttcggtcagggcttcagtccgaagctgcgtcatgttgcggcgcgcaccgaaggggcgacggtttttggctatcaggtgatggacccggaacgctttggcgtggtggagtttgacgacaatttccgcgctatctcgctggaagaaaagccaaaacagccgaagtcaaactgggcggtgaccgggctttatttctacgacagtaaagtcgtggagtacgcaaagcaggtgaagccgtcggagcgtggtgaactggagattacctccatcaaccagatgtacctcgaggcgggcaacctgaccgttgaactgctcgggcgcggatttgcctggctggataccggcactcacgacagcctgattgaagccagcacctttgtacagacggtggaaaaacgccagggctttaagattgcctgcctggaagagattgcctggcgtaacggctggctcgatgacgagggtgtgaagcgtgctgccagttcattagcgaaaactggctacggccaatatctgctggagttacttcgtgcccgtccgcgccagtattgagccactaacctgggaaaacgccttctttggtgttaacagcgccatcgtgcgcattacgtctgaagcaccgctcctgacgccagacgcgttagcgccgtggtcacgggtgcaggccaaaattgcggcatcaaatacgggtgaactggatgccctgcaacagctgggattctccctggtagaaggtgaagttgatttggcgctacccgtgaacaatgccagtgatagcggtgctgtagtggcacaagagaccgatattcccgcattacgtcagttagccagcgccgcatttgcgcaaagccgttttcgtgcgccgtggtatgcgcctgacgccagcagtcgcttttatgcacagtggattgaaaatgccgtgcgcggcacctttgatcatcaatgtctgattttacgtgcggcgtccggcgatattcgcggctatgtctctttacgggaactcaatgcgacagatgcgcgaattggcctgctggctggacgcggtgcaggtgctgagctgatgcaaacggcgctaaactgggcgtatgctcgcggtaaaacaactttgcgggtggcgacccaaatgggcaacaccgccgcgcttaaacgatacatacaaagtggtgcgaatgtagaaagcaccgcgtactggttatacaggtgatcacatgattccatttaacgcaccgccggtggtgggaaccgaactcgactatatgcagtcggcaatgggtagcggcaaactgtgtggcgatggcggttttacccgtcgctgccagcagtggctggagcaacgttttggcagcgccaaagtgttactgacgccgtcctgcaccgcttcgctggagatggcggcgctgctgctcgatatccagcctggcgatgaagtgatcatgccgagctacacctttgtctccaccgccaatgcctttgtgctgcgtggcgcaaaaatcgtttttgtggatgttcgcccggacaccatgaacatcgacgaaacgctgattgaagcggcgatcaccgacaaaacgcgcgttatcgtgccggtccattacgcgggtgtggcctgcgaaatggacaccattatggcgttggcgaaaaagcataatttgtttgtggtagaagatgccgctcagggcgtgatgtccacttacaaagggcgtgcactgggaaccattggtcatattggctgctttagcttccatgaaaccaaaaactacacggcgggcggtgaaggcggcgcgacgctgattaacgataaagcgttaatcgaacgagccgagatcatccgtgaaaagggcactaaccgcagccagttcttccgtggtcaggtcgataaatatacctggcgcgatattggctccagctatttgatgtccgatctgcaagctgcatacctgtgggcgcaactggaagcagcggatcgtatcaaccagcaacgtctggcgctgtggcaaaactactacgatgcgttagcgcctctggcgaaagccgggcgtatcgagctgccgtcgattcccgatggctgcgtgcagaacgcgcatatgttctacattaaactgcgggatattgatgaccggagcgcgttgattaactttctgaaagaagcggaaatcatggcggtgtttcattacattccgctgcacggttgccctgcgggggaacactttggtgagttccacggtgaagatcgctacaccaccaaagagagcgagcgcctgctgcgcctgccgctgttctacaacctgtcgcccgtcaatcagcgtacggtaattgcgactttgttgaactacttttcctgatatgtcgttggcaaaagcgtccttgtggacggcggccagtacactggtcaagattggtgccgggttactggtcggtaagttgctggcggtgtcatttggtccggcggggcttgggctggcggcaaatttccgccagttgattaccgtgctcggcgtgcttgccggggctggcatctttaacggtgtaaccaaatacgttgcccagtaccatgataatccgcaacagctgcgccgcgtggtcggcacttcatcagcgatggtacttggtttctctacgctgatggcgctggtttttgtgctggcagctgcgccaatcagccagggattgtttggtaataccgactatcaggggctggtgcgtttagtggcgctggtgcaaatggggatcgcctggggcaacctgttactggcgctgatgaaaggctttcgcgatgccgcaggtaatgcgttatcgctgattgtcggcagcttgattggcgttctcgcgtactacgtcagttaccgtttgggcggttatgaaggggcgttgctgggtctggcgctgattcccgcgctggtggtaattcctgccgccatcatgttgatcaaacgtggtgtcatcccgttaagctatctgaaacccagctgggataacggtctggcagggcagttgagcaaatttacgctcatggcgttgattacgtcggtgaccttgcctgttgcttacatcatgatgcgtaaactgctggcggcgcagtatagctgggatgaggtggggatctggcaaggggtgagcagtatttccgatgcctacctgcaatttattacggcatcgttcagcgtatatttgctgcccacgttgtcgcggctaacggaaaagcgcgatatcacccgggaagtggttaaatcgctgaaattcgtcttaccggcagtggcggcggcgagttttaccgtctggctgctgcgtgattttgctatctggctgctgttgtcgaataaatttaccgctatgcgcgatctctttgcctggcagttagtgggtgatgtgttaaaagtgggcgcttatgtctttggttatctggtgatcgccaaagcgtcactgcggttttatattctggcggaagtcagccagttcactttattgatggtatttgcccactggctaatccctgcgcatggtgcactgggcgcggcgcaggcatatatggcaacttatatcgtctatttttctctttgttgtggcgtgtttttactctggcgtaggcgggcatgactgtactgattcacgtactgggatcggatatccctcaccataaccgaaccgttttgcggtttttcaatgacgcgctggccgcgacgagcgagcacgcgcgcgagtttatggttgttggcaaggacgacggcttaagtgatagctgtccggcgctttctgtgcaatttttccctgggaaaaaatcgctggcggaagcggtcatcgcgaaagcaaaagctaaccgtcagcagcgttttttcttccacggtcagttcaatcccacactgtggctggctctgctgagtggtggcattaagcccagccagtttttctggcatatctggggggcagacctgtatgagctttccagtggcttgagatataagcttttttacccactacgtcgcctggcgcaaaagcgagtcggctgtgtatttgccacccgcggcgatttgagcttttttgccaaaacgcacccaaaggtgcggggcgaactgctgttcttcccgacgcggatggacccttcgctcaatacgatggcgaacgatcggcaacgtgaagggaaaatgaccattctggtggggaactccggcgaccgcagcaatgagcatattgctgccttgcgcgccgttcatcagcaatttggcgatacggtaaaagtggtggtgccgatgggatatccgcctaataacgaagcgtacattgaggaagttcgtcaggcggggctggagttattcagcgaagaaaatctacaaattctgagcgaaaaactggaatttgacgcctatctggcgctacttcgtcagtgcgatcttggttactttatttttgcccgccagcagggcattggtacgctgtgcttactgattcaggcgggcattccttgtgtgcttaaccgggaaaatccgttctggcaggatatgacggaacaacatttgccggtgctgtttactaccgacgatctcaacgaggatattgtgcgtgaagcgcagcgccagttggcgtcggtggataaaaacaccattgccttctttagccctaactatctacaaggctggcagcgggcgttggcgattgccgccagggaggtcgcatgagtctgctgcaattcagtggcctgtttgttgtctggctgctctgcacgctgtttattgccacgctgacctggtttgagtttcgccgtgtgcgctttaacttcaatgtcttcttttcattgctgtttttgctcacctttttcttcggcttcccgctgaccagcgtgctggtatttcgctttgatgttggtgtcgcgccgccagaaatcttgttgcaggcgttgctttctgcgggctgcttctacgcggtttactatgtcacctacaaaacccgcctacgcaaacgcgttgctgatgtaccgcgccgtccgctgtttaccatgaaccgcgtggagaccaatcttacgtgggtgatcctgatgggtatcgcgctggtaagcgtcggcatcttcttcatgcacaacggctttttgctgttccggcttaactcctacagtcagatcttttccagtgaagtctccggcgtggcgttaaaacgcttcttttactttttcatcccggcgatgctggtggtctactttctgcgccaggacagcaaagcgtggctgtttttcctcgtcagcacggtcgcctttggcttgctgacttatatgattgtcggcggcactcgcgccaatatcatcatcgcattcgctatcttcctgtttattggcattattcgcggctggatttcgttgtggatgctggcggcggcgggcgtgctggggattgttggcatgttctggctggcactaaaacgctatggaatgaatgtgagcggcgatgaagcgttctatacgtttctctatctcactcgcgacaccttctcgccgtgggagaatctggcgttgctgttgcagaactacgacaacatcgacttccagggcctggctccaattgtccgcgatttctatgtctttatcccttcctggctgtggccgggtcgcccgagtatggtgctgaactcagccaactactttacctgggaagtgctgaataaccactccggactggcgatctcgcctacgcttataggctcactggtggtgatgggcggcgcgttgttcatcccgctcggggcgatcgtggttggtctgatcatcaaatggttcgactggctgtatgagctgggcaaccgcgagcctaatcgctataaagctgcgatattgcacagtttctgctttggggcgatcttcaatatgatcgtgctggcgcgtgaagggctggattcgtttgtctcacgcgtggtcttttttatcgtggtcttcggcgcatgtctgatgatcgcaaaactgttgtactggctttttgaaagcgccggactcattcataaacgtacaaaatcatcgctccggacgcaggttgaaggataacaatgaataacaacaccacggcaccaacctatacgctgcgtggcttacagttgattggttggcgtgatatgcagcacgccctcgattatctgtttgctgacgggcagcttaagcagggaacgctggttgccattaatgctgaaaaaatgctgactattgaagataacgccgaggtcagggagttaattaacgctgccgaatttaaatatgcggatggcatcagcgttgtacgttcagtacgtaaaaagtacccgcaggcgcaggtttcccgcgttgccggtgccgatctctgggaagagctgatggcgcgcgcaggcaaagaagggacgccggtatttcttgtgggcggtaaacctgaagtgctggcgcaaactgaagctaaactgcgcaaccagtggaatgtgaatatcgttggcagtcaggatggttattttaaacccgagcagcgtcaggcgctgtttgaacgcattcatgccagcggtgcgcaaatcgtcaccgttgcgatgggatcgccaaagcaggagatcatcatgcgcgactgccgtctggtacatccagatgcgctgtatatgggcgttggcgggacttacgatgttttcaccggtcacgtaaaacgcgcaccgaaaatctggcaaacgctggggctggagtggctctaccgcctgctttcgcagccgagccgcattaagcgtcagcttcgtttgctgcgttatttacgctggcactacaccggcaacctatgattttcctctctttgtaaagcgacggagtggtcactccgtcgcctgtctgcttttttattacacaaagcattcaaatttttaatgctttatttgccatttctcctgaattacgaaaacatttgcaacactcgatgtacccataacgataaccggtaacaccggaaagcatgcaaacacaacacgaggatttatggcagataacaaaccagagctacagcgtgggctggaagctcgacatatcgaactcatcgccctggggggcaccattggcgtcggcctgtttatgggggccgccagtaccctgaaatgggccgggccatccgtattgttggcctatatcatcgccgggctgttcgtctttttcatcatgcgttcaatgggcgaaatgttgttcctcgaaccggttaccggttcgttcgccgtttatgcgcatcgttatatgagcccgttctttggctatctcaccgcctggtcttactggtttatgtggatggcggtggggatctctgaaatcaccgccattggcgtttatgtccagttctggttcccggagatggcgcagtggatacccgcattgatcgcagtggcgctggtggcgttggcgaatctggcggcggtgcggttgtacggcgaaatcgagttctggttcgcgatgatcaaagtcaccacgattatcgtgatgattgtcattggcctgggcgtgattttctttggctttggcaatggcgggcagtcgattggttttagcaatctcacagagcatggcggtttctttgcgggtggctggaaagggttcctgaccgctctgtgtattgtggtggcgtcctaccagggcgtggagctgattggcattactgccggtgaagcgaagaatccgcaggtgacgctgcgcagtgccgtaggcaaggtgctgtggcggatcctgattttctacgtaggcgcgattttcgttatcgtcaccatcttcccgtggaatgaaataggcagcaacggcagcccgttcgtactgacttttgccaaaatcggtattaccgcagcggcgggcattatcaactttgtggtgctgacggctgcgctctctggctgtaacagcggcatgtacagttgcggacgtatgctctacgcactggcgaaaaaccgtcagttaccggcggcaatggcgaaagtttcccgtcacggcgtaccggttgcgggtgtggcagtatctattgctattctgctaattggctcatgcctgaactacatcattcccaatccgcagcgtgtgtttgtctacgtctacagtgccagcgtgcttccggggatggtgccatggtttgtgatattgataagccagctgcgttttcggcgtgcacataaagcggcgattgccagccatccgttccgctcaatcctgttcccgtgggccaattacgtaacaatggcattcctgatttgcgttttgatcggcatgtactttaatgaagatacgcgtatgtcgctgtttgttggcatcatctttatgctggcggtgacggcgatttataaagtttttggccttaatcgccacgggaaagcgcataaactggaggaataagcagcaaaacgcacaaaccgtaaccaaacgcgcaatttatttaaaaagggactagacagaggggtgggaagtccgtattatccacccccgcaacggcgctaagcgcccgtagctcagctggatagagcgctgccctccggaggcagaggtctcaggttcgaatcctgtcgggcgcgccatttagtcccggcgcttgagctgcggtggtagtaataccgcgtaacaagatttgtagtggtggctatagctcagttggtagagccctggattgtgattccagttgtcgtgggttcgaatcccattagccaccccattattagaagttgtgacaatgcgaaggtggcggaattggtagacgcgctagcttcaggtgttagtgtccttacggacgtgggggttcaagtcccccccctcgcaccacgactttaaagaattgaactaaaaattcaaaaagcagtatttcggcgagtagcgcagcttggtagcgcaactggtttgggaccagtgggtcggaggttcgaatcctctctcgccgaccaattttgaaccccgcttcggcggggttttttgttttctgtgcatttcgtcaccctcccttcgcaataaacgcccgtaataactcattgccccacggtatgatttcgcccttaacgtattgaaggatgacttcaggcaaggagcgaccatgctgcaacaggttccaacgcgtgcttttcatgtgatggcgaaaccgagcggttccgattgtaatctgaactgtgactactgtttttatctcgaaaaacaatccctttaccgcgaaaagccagtcacgcatatggacgatgacacgctggaagcgtatgtccgtcactatatcgctgccagcgaaccgcaaaacgaagtggcttttacctggcagggcggcgaaccaacgctactcgggctggcgttttaccgccgtgccgtagcgctacaggcgaaatatggtgctggcaggaagataagtaacagcttccagactaacggcgtgctgctggatgacgaatggtgcgcgtttctcgcggagcatcattttcttgttggtttatcgctggatggcccgcctgagatccacaatcaatatcgcgtgactaaaggtggcagacccacgcataagctggtgatgcgtgccctgacgctcctgcaaaaacatcatgtcgactataacgtgctggtctgcgttaatcgcaccagcgcgcagcaaccgttgcaggtatatgattttttgtgcgatgcgggagtcgaattcatccagtttattccggtggtcgagcgcctggctgatgaaacaactgcccgcgatggacttaagttacatgcgcctggtgatattcagggtgagctaacggaatggtcggtgcgccccgaggagttcggtgagtttctggtggcgatattcgaccactggatcaaacgcgacgtcggcaagattttcgtgatgaatatcgaatgggcgtttgccaattttgtcggtgcgccgggtgcggtttgccatcatcagccaacctgtgggcgctcggtgattgttgagcacaacggcgacgtttacgcctgtgatcactatgtttatccgcaatatcggctggggaatatgcaccagcaaacaattgcagaaatgatcgattccccgcaacagcaggcgtttggtgaagataaatttaagcagttaccggcgcagtgtcgcagttgtaacgtgttaaaagcgtgctggggaggctgcccgaaacaccgcttcatgctcgatgccagcggcaaaccgggactgaattatttgtgtgccgggtatcagcgttatttccgccatctaccgccatatcttaaagcaatggctgatttgctggcgcacggtcgcccggccagcgacattatgcatgcgcatttgctggtggtgagtaagtagaaatcggcggccgcctgcggttgattgccggatgcggcgtaaacgccttatccggcctacatgatcgtgcaaattcaataaattgcagcgttctgtaggctggataagatgcgtcagcatcgcatccggcaaaggcagatctcagcgatagcgccggcttagtcagatttaatctgcgcgcgtggtggatattttttcaggatctccatatacgcgtgcatttcggtctgtagcggtacacccatcggaatatggcgcacgccgatggagtcgctttcctgcggatcggtgtagaggttaaacaccgacgatcccgccgtttgcattactgtgccggtgaatccaccctgatatccgctctgggtataagcgtaaggttgctgaatcaggacgtgatacttgaactcatccatacgcacagcagcgagtttaccgttgaggaagtagtgctcggccttacggttagactgaccatttgttcccaggaagaaggatgtctggtccacaccatcgataaaggtggttttcggcactaaattcgccactttcgctccaggatgccctgccagatccagcgcggtagggaagagatctgccagatcgacaataccgtcagatttacgcggttggatcatccctttccagtaaacgaaagtcggtacgcgaacgccgccttcccaggtcgaacctttcgcaccacggaacggggtgcgtccgtgcggcggtacttcggcttccggtccgttatcggaggtaaagacgatcagcgtgttatcaagctgaccgtttttctccagtgttttatacagattagcgaacacatcgttcatctccaccatgcagtcgccatacgaggtgcgtgccggagagctacccgcatatttcgcatttgggtagttatcgaagtggcagccacgagtgccgtagtagaggaagaatggtttatcgctcttcgccatcttgtcgaggaacttaacgccatagtccatccagcgttgatccagatcttccatatatttcggcgtaatgtcggcaatggcctgttgttcgccgccgcgcaccgcatgaacgtcatctttgctgaacggtaattgcttgatgtattcagaacggtccggactcagggccacttccggattgacgtgaacgtcgcgccattcggtgtacatatcagacaccgagttaaagccacggaaatcatcaaagccaacgttctgcggctgcgactctttgttttcccccatatgccattttccgatggcctgagtgacgtagccctgatcgtgcagcaactgcggcagcgtggttaacccttgcagcccgcccggttgcccgtacattggcggcatcagaatgccgtggtggatggagtattgtccggtgagaatggtggcgcgggttggggaagagcttggttgagaatacgccgaagttaaaatcagcccctggctggcaacggcgtcgatatctggtgtagggttacccaccgccacgccgccaccgttaaaaccgacgtccatccagcccacatcgtccagcaagaaaacaaccacattcggtttcttaccggtttttttctcaagttctgccagcttctgctgggtttctttatcctgcgccggatgctgcattactggcatcatattgtcggcaatagtggtcgccggtttaaccagatactggtttgggtgatcgtatccggcaaagcctttgcgtgcggtggcagttgacggggtatctgctgcgctggccatgagaggaagagcggcggcgacagcaacaacaagacgtttgggtgaaaacgaaaattccatgcaaaatgctccggtttcatgtcatcaaaatgatgacgtaattaagcattgataattgagatccctctccctgacaggatgattacataaataatagtgacaaaaataaattatttatttatccagaaaatgaattggaaaatcaggagagcgttttcaatcctacctctggcgcagttgatatgtaaggcaggtttattatatcgcgttgattattgatgctgtttttagttttaacggcaattaatatatgtgttattaattgaatgaattttatcattcataataagtatgtgtaggatcaagctcaggttaaatattcactcaggaagttattactcaggaagcaaagaggattacagaattatctcataacaagtgttaagggatgttatttcccgattctctgtggcataataaacgagtagatgctcattccatctcttatgttcgccttagtgcctcataaactccggaatgacgcagagccgtttacggtgcttatcgtccactgacagatgtcgcttatgcctcatcagacaccatggacacaacgttgagtgaagcacccacttgttgtcatacagacctgttttaacgcctgctccgtaataagagcaggcgtttttttatgtatcaggaaggccccggaggtgcttgcctccgggtgagaaggaactactgtggcgggttattctgcaacgttaacatcaaaccgtcgcgacgcatagctgcagcttcttccggcttgtgcagtctgtccagcgcgtcggcaagccatgcgtaatcgtaggcgtccggacgttgtttcagcgctgcgcggaaggcgagcgatgcttcctgccattctccgtgcttcatcagtgactggcccagtgtgctccacaacagcgggcgatcgccgacgtttttgatttgctggcgcagcactttttccagctgttccggattgtttgttttcagtcgaggaatcggcagcagtaggcgatcgtcgtactggcgtttcaggccatcgatgataatttgctgggcagtatcatgatcgtcacattcaataagatgttccgccattgccacctgcaacgctacctgatgacgcgttttccggctttggtttttccaccagttacgcaaaccttcgctaccgttatcggcacgcgcctgatccatcaggccaatccatgcctgttgttccagcattgcacgatgttcttcatcaccaacatgggctttcgccattgatgggataatatccagcagcgaactccatgcacctgtgcggatatacgcctgttccgccagacgtaatacttccggatggcgtggcgtaacttccagcagcttatccacgccgtggcgtgcagcatggttttcattacgggccagttgcagacgtacgcgggtgatttctaccggaatggtgtcgttgccggccagctccgctgcgcgttccagatgttggttggcgcgtgcttcatcaccacgttgttgcgcggcttcggcagccagtagatagttcaccaccggttgttccgcgtgatcggcatttttcgccatcagcttttcaacttgctgataatcgccttccgccagtttcagcagcgcctgttcggtctgcttacgtgcacggcgacgcttacgtccgacaaaccacccacgggtgtgcgcgccagtgcggaagatccgccgcagtagccactcaatggcaaacagcactaccatcgccagaatcaatatgatcgccaggcccgtgacgctggtttcgatattgtagttgtcggtctggatcagcacataaccctgatggccggcaatcatcgggccaaccacgatccccgcaatcagcaacacaaagagcaataacacttttagcatggttattctccttgcggcgcggctgccggagtatcagcttgcggtgcaggtgcaggtttagcttccgttgtccccgctgccggttgtgccagcaggttacgcacgcgagtctgcatcagtttttccagcatcgcctggctttgcagggtttccggaagatccatcgagatattttgctggcttaactggtccacctcgtcgaggaacgctttggtggtggcatcatcagtatcgtagtaagcacgtacccaggtggagacgttctccagcgcctggcgataagtctcttcctggtgacgcggtacagcttgtgctgcgaccagcaggcgagagcgaatattttcgcgcagatagatatcctgatttggcgctaacagcggtacggcggtgtcatcacgacggcgaatcgtaatgaagttgtccataaagttctgccagcttttttgcagattgatacgccattcgctgatggaactggaaagctcttcaccgtctgaatccatcggcgaaccatcgctgtcattatcggccagacgcaggttatctacctgatttgaaagctgattaagcttaaggatgatgccgtcataatccacctgcgatactgcagaaaggctggcgatatcatcggtaattgcccgacgaacggtaatcagactcgggtcattcatatccgccaggctggcgtctgcacttttcagcaacgctgcagcggtcgtgacgtcctgatcgctccacagcttccgtccggcgagtttcaccagaaaatcggcctgagccagcagccaggttttagcatcgctgccggaaatggtggcgaccttttgttggacttcatccaactgttttgccagcgtttcttgctgacgattcgcctgcttaagttgtgcagcttgttgcttaataatgccttccagctcggctttttggctctcctgggctttttgcaatgccgtcagttggttagccagggcatcgctggtggcggtctgattgacggcctgttgtttaccccagccatacaaaccgatgcccgccgccagagcaatagcgatagccaccgcgctgagaatcaatgcggtattgttcttactctttttttctgttgcgacaggttgtgacgtggtgtccacggcctccctggtctcttcaaccacggcggaggttttttcttgttccgtcattatggcttcctgttatgagagttattgtaatgcccgtaaaagcgcatcgttgtcagcgttatcggcgaccttaatgtcttgccagcccagttcccgggcgagtttcgccaaacgctcactgacgaccaatagtcgacagtgtagtaaccagtgctcacgataccattgtgggatcagcgaccagagttgctgcaacatttcaccgctggtaacaacgaccatcgtcacctcgcgggcttgccagcgcatcgcttcttctgcaccatcgtaatggattgcgcatcgttgataacattcacaaaaagtgacctcagcaccgcgcgccgtcagggtatccccaattagctcacgaccaccattgccacgtaatatcagcgcacgtttgcccgcaatattttgtaattcaggtaattgtagcaagacttcgctgatttcccgatcctgcgggtagagaatcttctgtccacttacggtatgtagtgccagtgcggtggtgcgtccaatggcgaaataatcaggtagtcggggccatttacgatcttgctgatgcagctgtgattgggcaaaagcaaccgcgtgttgcgagagggcaaacaacagatcgctctcccccagcgctgccagttgatcagcaagttgcggtaattgttgacccggagaaaactcaatcagcggaaaatgccaggccacctgccccagtgtgcgcagacggctcactaactcttctccagcgggagacgggcgggtgacaaggatactcatgccggggcgtctccgttatagacttcagcgaggatctcgcgcgcgccgttattcagtagctcttctgccagcgaaatccccatttgttcggcatcttgcggcgcaccgcggcgttcaccgcgaataatctgcgaaccgtccggcgcgccgaccagcgcacgcagccagatttcgccatcaataagctcggcgtagctaccaattggcacctgacatccgccttcgagacgggtattcatggcgcgttctgcggtaacgcgcagtgcagtttcgtggtgattcagcgcggcaagcagctcgcgagtgcgtgaatcatcaaggcggcattcaatacccaccgcaccttgtcctaccgccggaagagaaatctcgggtggcaacgcggcgcgaatacgtgactccagacctaaacgttttagtccggctacggcaagaatgatggcatcgtattcgccgttatccagtttgctcaggcgagtgccgacgttgccgcgcagggagcggataatcagatccggacggcgttcagccagttggcactggcgacgtaaactggacgtcccgacgatactgcctgccggtaacgcatccagactgtcatagttattggacacaaaggcatcgcgaggatcttcacgctcacaaatagtgaccagtcccagaccttgcgggaattcaaccggcacatctttcattgagtgtacggcgatatcggcgcgattttcgaggagcgcgacttccagctcttttacaaataagccttttccgcctactttcgccagcggcgtatcaagaatcacatcgccgcgcgtcaccatcggtaccagttcaacgaccaggcccggatggctcgccatcaacttgtctttgacatagtgtgcctgccagagtgcaagtgggctttggcgtgtggcaattcttaaaacattgtctaacatgcttgttaccgtcattatcatccgtggtccatcctaacatccttgccagagtgatgtcagtgttgtggtgaaacgtagacgcctgcgcaaaccgtaaaatgaggtctggcagtggatcctgacaggcgtttcacgccgttgtaataaggaatttacagagaataaacggtgctacacttgtatgtagcgcatctttctttacggtcaatcagcaaggtgttaaattgatcacgttttagaccattttttcgtcgtgaaactaaaaaaaccaggcgcgaaaagtggtaacggttacctttgacatacgaaatatcccgaatgccgcgtgttaccgttgatgttggcggaatcacagtcatgacgggtagcaaatcaggcgatacgtcttgtacctctatattgagactctgaaacagagactggatgccataaatcaattgcgtgtggatcgcgcgcttgctgctatggggcctgcattccaacaggtctacagtctactgccgacattgttgcactatcaccatccgctaatgccgggttaccttgatggtaacgttcccaaaggcatttgcctttacacgcctgatgaaactcaacgccactacctgaacgagcttgaactgtatcgtggaatgtcagtacaggatccgccgaaaggtgagcttccaattactggtgtatacaccatgggcagcacctcgtccgtagggcaaagttgttcctctgacctggatatctgggtctgtcatcaatcctggctcgatagcgaagagcgccaattgctacaacgtaaatgtagcctgctggaaaactgggccgcctcgctgggtgtggaagtcagcttcttcctgattgatgaaaaccgcttccgtcataatgaaagcggcagcctggggggcgaagattgtggctccacccagcatatactgctgcttgacgaattttatcgtaccgccgtgcgtctcgccggtaagcgtattctgtggaatatggtgccgtgcgacgaagaagagcattacgacgactatgtgatgacgctttacgcgcagggcgtgctgacgccaaatgaatggctggatctcggtggcttaagctcgctttctgctgaagagtactttggtgccagcctttggcagctctacaagagtatcgattccccatacaaagcggtactgaaaacactgctgctggaagcctattcctgggaatacccgaacccacgtctgctggcgaaagatatcaaacagcgtttgcacgacggcgagattgtatcgtttggtctcgatccatactgcatgatgctggagcgtgttactgaatacctgacggcgattgaagattttacccgtctggatttagtacgtcgctgcttctatttaaaagtgtgcgaaaagctcagccgtgaacgcgcctgcgtaggctggcgtcgcgcagtgttgagccagttagtgagcgagtggggttgggacgaagctcgtctggcaatgctcgataaccgcgctaactggaagattgatcaggtgcgtgaggcgcacaacgagttgctcgacgcgatgatgcagagctaccgtaatctgatccgctttgcgcgtcgcaataaccttagcgtctccgccagtccgcaggatatcggcgtgctgacgcgtaagctgtatgccgcgtttgaagcattaccaggtaaagtgacgctggtaaacccgcagatttcacccgatctctcggaaccgaatctgacctttatttatgtgccgccgggccgggctaaccgttcaggttggtatctgtataaccgcgcgccaaatattgagtcgatcatcagccatcagccgctggaatataaccgttacctgaataaactggtggcgtgggcatggtttaacggcctgctgacctcgcgcacccgtttgtatattaaaggtaacggcattgtcgatttgcctaagttgcaggagatggtcgccgacgtgtcgcaccatttcccgctgcgcttacctgcaccgacaccgaaggcgctctacagcccgtgtgagatccgccatctggcgattatcgttaacctggaatatgacccgacagcggcgttccgcaatcaggtggtgcatttcgatttccgtaagctggatgtcttcagctttggcgagaatcaaaattgcctggtaggtagcgttgacctgctgtaccgcaactcgtggaacgaagtgcgtacgctgcacttcaacggcgagcaatcgatgatcgaagccctgaaaactattctcggcaaaatgcatcaggacgccgcaccgccagatagcgtggaagtcttctgttatagccagcatctgcgcggcttaattcgtactcgcgtgcagcaactggtttctgagtgtattgaattgcgtctttccagcacccgccaggaaaccgggcgtttcaaggcgctgcgcgtttctggtcaaacctgggggttgttcttcgaacgcctgaatgtatcggtacagaaactggaaaacgccatcgagttttatggcgcgatttcgcataacaaactgcacggcctgtcagtgcaggttgaaaccaatcacgtcaaattaccggcggtggtggacggctttgccagcgaagggatcatccagttctttttcgaagaaacgcaagacgagaatggctttaatatctacattctcgacgaaagcaaccgggttgaggtatatcaccactgcgaaggcagcaaagaggagctggtacgtgacgtcagtcgcttctactcgtcatcgcatgaccgttttacctacggctcaagcttcatcaacttcaacctgccgcagttctatcagattgtgaaggttgatggtcgtgaacaggtgattccgttccgcacaaaatctatcggtaacatgccgcctgccaatcaggatcacgatacgccgctattacagcaatatttttcgtgatgaacgtgccggaaagcgaggcttatccggcatgcaatcttagcggaaactgactgtttcacccgcctgctgcgtcgccgcctgttccagcaaatcccagaaggtttcgccgctgcgatcacaaatccactcatcgcctttcaggtcaaaatggtagccgccctgtttggttgccagccatacctggtgcagcggctcctggcggttgataatgattttgctgccattctcaaaggtaatggtcagtacgccgccgttgatttcgcagtcgatatcgctgtcgccatcccagtcgtccaggcgttcttcaatggtcagccagagttgatcagccaggcgatgaaattcactgtcgttcattgttgtatcctgtttttaagtgatggcggcagtatagcggcatggggtcagggcttcaaagtttgcacctctgcggctgcgttccggcacgattcatccgtcaccggaataatgatgtctctgtgtagcgaaagatttgtctcttcattagggcgcagttacaccacgtctttccctgtttctggtaaacattatgatcaggtttaccgagcgagcatcctcacgctgacggaactaaaaaagacaacaaacaaaccacattgcgatagtgcataaagccatcctggcgcgaggtgccgatcacgaaactaccagcaaaacataaatccccacgagtaagcgttatactcgcagcatttcctcacttttcagacttcataaagagtcgctaaacgcttgcttttacgtcttctcctgcgatgatagaaagcagaaagcgatgaactttacaggcaatccataatgaaaaacgtgtttaaggcactcactgtattacttactctcttcagcctgacgggctgcggtctgaaaggtccgctctatttcccgcctgcagataaaaacgcaccgccgccgaccaaaccggtagagacgcaaacgcaatccacggtgccggataaaaacgatcgcgccactggcgatggtccatcccaggtgaattactaaaagtcagtttctgtacccgcgtgattggagtaaatgatgcagttctcgaaaatgcatggccttggcaacgattttatggtcgtcgacgcggtaacgcagaatgtctttttttcaccggagctgattcgtcgcctggctgatcggcacctgggggtagggtttgaccaactgctggtggttgagccgccgtatgatcctgaactggattttcactatcgcattttcaatgctgatggcagtgaagtggcgcagtgcggcaacggtgcgcgctgctttgcccgttttgtgcgtctgaaaggactgaccaataagcgtgatatccgcgtcagcaccgccaacgggcggatggttctgaccgtcaccgatgatgatctggtccgcgtaaatatgggcgaacccaacttcgaaccttccgccgtgccgtttcgcgctaacaaagcggaaaagacctatattatgcgcgccgccgagcagacaatcttatgcggcgtggtgtcgatgggaaatccgcattgcgtgattcaggtcgatgatgtcgataccgcggcggtagaaacgcttggtcctgttctggaaagccacgagcgttttccggagcgcgccaatatcggttttatgcaagtggttaagcgcgagcatattcgtttacgcgtttatgagcgtggggcaggagaaacccaggcctgcggcagcggcgcgtgtgcggcggttgcagtagggattcagcaaggtttgctggccgaagaagtacgcgtggaactccccggcggtcgtcttgatatcgcctggaaaggtccgggtcacccgttatatatgactggcccggcggtacatgtctacgacggatttattcatctatgaagcaaccaggggaagaactgcaggaaacactcacggagcttgatgaccgggcggttgtcgattatctgattaaaaatcctgagttttttatccgtaatgcgcgcgcagtagaagcgatacgtgtgccgcatccggtacgcggcaccgtttcgttggtcgagtggcacatggcccgcgcacgtaatcatattcatgttctggaagagaacatggcgctgttgatggaacaggctatcgccaacgaaggcctgttttatcgcctactctacctgcagcgcagtctcaccgccgccagcagtctcgacgatatgctgatgcgctttcaccgctgggcgcgcgatctcggcctggcaggtgcgagtctgcgcctgtttccggatcgctggcgcttaggtgcgccgtcgaaccacactcatctggcattaagccgtcagtctttcgaaccgctgcgtattcagcgtttggggcaggaacagcactatcttgggccgcttaacggaccagagctgctggtggtgctaccggaagcgaaagcggtgggatcggtggcgatgtcgatgctgggaagcgatgctgatttgggtgtcgtgctgtttaccagtcgcgatgccagtcactatcaacaagggcaaggaacgcagttacttcatgaaattgcgctgatgttgccggagcttctggagcgttggattgaacgcgtatgaccgatttacacaccgatgtagaacgctacctacgttatctgagcgtggagcgccagcttagcccgataaccctgcttaactaccagcgtcagcttgaggcgatcatcaattttgccagcgaaaacggcctgcaaagctggcagcaatgtgatgtgacgatggtgcgcaattttgctgtacgcagtcgccgtaaagggctgggagcagcaagtctggcgttacggctttctgcgctacgtagcttttttgactggctggtcagccagaacgaactcaaagctaacccggcgaaaggtgtttcggcaccgaaagcgccgcgtcatctgccgaaaaacatcgacgtcgacgatatgaatcggctgctggatattgatatcaatgatcccctcgctgtacgcgaccgtgcaatgctggaagtgatgtacggcgcgggtctgcgtctttctgagctggtggggctggatattaaacacctcgacctggagtctggtgaagtgtgggttatggggaaaggcagcaaagagcgccgcctgccgattggtcgcaacgctgtggcgtggattgagcactggcttgatttgcgcgacctgtttggtagcgaagacgacgcgctttttctgtcgaaactgggcaagcgtatctccgcgcgtaatgtgcagaaacgctttgccgaatggggcataaaacaagggctgaataatcacgttcatccgcataaattacgtcactcgttcgccacgcatatgctggagtcgagcggcgatcttcgtggtgtgcaggagctgctgggtcatgccaacctctccaccacgcaaatctatactcatcttgattttcaacaccttgcctcggtgtacgatgcggcgcatccacgcgccaaacgggggaaataatgcgtttttaccggcctttggggcgcatctcggcgctcacctttgacctggatgataccctttacgataaccgtccggtgattttgcgcaccgagcgagaggcgcttacctttgtgcaaaattatcatccggcgctgcgcagcttccagaatgaagatctgcaacgcctgcgccaggcggtacgggaagcggaacccgagatttatcacgacgtgacgcgctggcgttttcgttcgattgaacaagcgatgctcgacgccgggctgagtgccgaagaagccagtgcaggcgcacacgcagcaatgatcaactttgccaaatggcgcagccgaatcgacgtcccgcagcaaactcacgacaccttaaaacagctggcgaagaaatggccgctggtggcgatcaccaacggtaacgcccagccggagctgtttggtttgggggattattttgagtttgtgctgcgcgctggcccgcacgggcgctcaaaaccgttcagcgatatgtactttttggctgcggaaaaactcaacgtgccgatcggcgagatcttacatgttggggacgatctcaccactgacgtgggtggggcaattcgcagcggaatgcaggcttgttggatcagaccggaaaatggcgatctgatgcaaacctgggacagccgtttactgccgcatctggaaatttcccggttggcatctctgacctcgctgatataatcagcaaatctgtatatatacccagctttttggcggagggcgttgcgcttctccgcccaacctatttttacgcggcggtgccaatggacgtttcttacctgctcgacagccttaatgacaaacagcgcgaagcggtggccgcgccacgcagcaaccttctggtgctggcgggcgcgggcagtggtaagacgcgcgtactggtgcatcgtatcgcctggttgatgagcgtggaaaactgctcgccatactcgattatggcggtgacgtttaccaacaaagcggcggcggagatgcgtcatcgtatcgggcaactgatgggcacgagccagggcggtatgtgggtcggcaccttccacgggctggcgcaccgtttgctgcgtgcgcaccatatggacgccaatctgccgcaggatttccagatcctcgacagtgaagaccagctacgcctgcttaagcgtctgatcaaagccatgaacctcgacgagaagcagtggccgccgcggcaggcaatgtggtacatcaacagccagaaagatgaaggcctgcgtccgcatcatattcaaagctacggtaatccggtggagcagacctggcagaaggtgtatcaggcgtatcaggaagcgtgtgaccgcgcgggcctggtggacttcgccgagctgctgctgcgcgctcacgagttgtggcttaacaagccgcatatcctgcaacactaccgcgaacgttttaccaatatcctggtggacgaattccaggataccaacaacattcagtacgcgtggatccgcctgctggcgggcgacaccggcaaagtgatgatcgtcggtgatgacgaccagtcaatctacggctggcgcggggcgcaggtggagaatattcagcgtttccttaatgatttccccggtgccgaaactattcgtctggagcaaaactaccgctctaccagcaatattctgagcgccgctaacgccctgattgaaaacaataacgggcgtctgggtaaaaaactgtggaccgatggcgcggacggtgagcctatttccctctattgcgcttttaacgaactcgatgaagcgcgttttgtggttaaccgcatcaaaacctggcaggacaacggcggagcgcttgccgagtgcgccattctctaccgcagcaacgcccagtcgcgggtgctcgaagaggcgttattgcaggccagtatgccgtaccgtatttacggcgggatgcgcttcttcgaacgccaggaaatcaaagatgcgctctcgtatctgcgcctgattgccaaccgcaacgacgacgcggcctttgagcgtgtggtgaatacgccaacgcggggtattggtgaccggacgctggacgtggtacgtcagacatcgcgcgatcgccagttaacactctggcaggcatgtcgtgagctgttgcaggaaaaagccctcgccgggcgagctgccagcgccttgcagcgatttatggaattaatcgacgccttagcgcaggaaactgccgatatgccgctgcatgtacagactgaccgggtaattaaagactccggcctgcgtaccatgtatgagcaggagaagggcgaaaaaggtcagacgcgtatcgaaaacttagaggaactggtgacggcaacgcgccagttcagctacaacgaagaagacgaagatttaatgccgctgcaggcgttcctctcccatgcggcactggaagcaggtgaagggcaggcggatacctggcaggatgcggtgcagttgatgacgctacactcggcgaaaggcctggagttcccgcaggtgtttatcgttggtatggaagagggcatgttcccaagccagatgtcgctggatgaaggcgggcgtctggaagaagaacgccgtctggcctacgttggcgtaacccgcgcgatgcagaaactgacgctgacctacgcggaaacccgccgtctgtatggtaaagaggtttaccatcgcccgtcgcgctttatcggcgagctgccggaagagtgtgtggaagaggtgcgcctgcgcgccacggtaagccgcccggtcagccatcagcggatgggtacgccgatggtcgagaacgacagcggctacaagctcggccagcgcgtacgccacgctaagtttggtgaaggcaccattgtcaatatggaaggcagcggtgagcatagccgtttgcaggtggcatttcagggccagggtattaaatggctggtggcggcatacgcccggctggagtcggtgtaacgttgccggatgcggtgctgcgcaccttatttggcctaaaaaatcattcagattcaataaattgcaacgtcatgtaggccggatagggcgtttacgccgcatccggcatctgcgccatcttcagtatctgacacaaaactatcgttttaacctttccgctcgacggaaatcatggtgacaaaaggatagcgttgccacgggattgccccgcctttcatatacatatgtgaaatcgtgccatcaagataaagcagctgctcaacgttcagtttcgctttggcataacaggcaaaatcataaaaatttgttgcctgctggctcaacaaaaacacggcgttcccatgtttattaatcccaacaccgttacgaattttgcttgaggcgacgttgggatgaatacgcggattaattacaccgttttccatcaacattggccctgactgcaccgcaaactgaatctctttactggttttgaaggcatccagacgaacgatgccgactttatctcccgcgacataaaacacgccgccaggacggataaagaaattcccttcacctgaagcgagatttaacgccaccttctgctgaccgttttcgatgtacaaaccgagcggcgcatagctttcatcatagatgccgccgttcatcgccatctgcacctgaccctgactattaatatccgccagcagagcatgtaacgttccccacgcttcgccattggctttttgccagtacattttcacccgctctgtttgaggattaacggtatacgcctgtacggtcagcgtcggatctgagagtgcgcaatcatcagcggcaacagcaaacaagggaagtaaggtgagggcgagaaaaatccgtttgagattcaaggtgatcattcctttaccaatgagtagctgatgcgccattataggtcctggatgtgggatttttttatcctgttagcgaccttgacgagtaccaaaaagcgcgaagttcaactattgttctgtggtgttctgttgcgtgttgacggcaaaattttgctggcgtaacatgcgcgcacgatcactctaagaggacattcgccttggacacacccagtagatactggctcactatcctgtcatccaggatcaactcctaaggctatccctttttgctgatagccttagcggttgtcagcgacctcaatttttcccgtcgcgctgagtcaggctgtttaatggtctgaaacccaatttgtttctgtgtgcccaccgaactgtccgatattttaagcattgggagtcccggtcatgctgagcgcatttcaactggaaaataaccgactgacccggctggaagtcgaagagtcacaaccccttgtaaatgcagtatggattgatcttgtcgaaccggacgacgacgagcgactgcgcgtacaatctgaacttggccagagcctggcaacccgcccggaactggaagacatcgaagcatcggcacgtttctttgaagacgacgacggcctgcatattcactccttcttcttctttgaagatgcggaagatcacgccggtaactccactgtggcatttaccatccgtgatggtcgtctgtttactctgcgtgagcgtgaactgcccgcttttcgtctgtatcgtatgcgtgcccgtagccagtcgatggtagacggtaacgcctacgagttgctgctggatctgttcgaaaccaaaatcgaacagttggcagatgaaattgaaaatatctatagcgacctggagcagttgagccgggtgattatggaagggcatcagggcgatgagtacgacgaggcgctctccactctggcggaactggaagatatcggctggaaagttcgcctgtgtctgatggatacccagcgcgcgctcaacttcctggtgcgtaaagcgcgtttaccgggtgggcaactggagcaggcgcgtgaaatcctgcgagatatcgaatccctgctgccgcataacgaatccctgttccagaaggtgaacttcctgatgcaggcggcaatgggttttatcaacatcgagcagaaccgcatcatcaaaatcttctcggtggtatccgtggtattcctgccgccgacgctcgttgcttccagctatggcatgaactttgagtttatgccagaactgaagtggagcttcggctaccctggcgcgattatctttatgatcctcgcgggcctggcaccgtatctgtactttaagcggaagaactggttgtaaaaaacgagagcggtggcttagtctggctaagccacctgttattcaaaggctccaggtatttaacccttttacctctttctcatagaaccatttgttcgtgttaacagcaacataggctgctacggcaattcccagaatgttaacgccaattagtgcaccaacaaatagagatagaataccaagtaatagaactataattgcttttttccataaccccaggacaaataaatatatccaggaacagaagaaagcaatgaaattcatttgaatagttaagcgttgtcttacttttaatgctttaaatgctgctttatattctggtgttgccccccagaatccaggaaaaccatgttgatcataaaaattaaatcggtatttccatttttcacttaatgaaccatcgttcatatattccttactcataaatactccataactattgttttgatgaatcagtaggtgcaagcattagcatactgaaagtggaaaaataacaaatcaaaaaaatcatcgaaccattgcctgaacaggcaaaatcttcggctatcattgtgatgatagagatgatatatactgctaatgtaccaaaaacataagtttttatatagatgaaaccactatcacggagtcgctggcaattcatgttgatgacgagataatggagtacgatggtagagactataacaagaaagcctgcttctccatcgttaaaaaagataataagaaaggcaaaaatgaaatttattaaaataaatgaaaatatataacgacgtctggaaatcttaccgttagatgttgggataaatatacgtaacataaattttacatccttgtatgagtctccggtcagcatggcaatatgcccactctcatgcaagagtcggcatattttttcagaatatatttattttttatttggacgttctacgctgcgtataaatcgcatccatcacaaaaattgccagcgccacccaaataaaggcgaaagtcaccatcttatcggcacccggtttttcaccataaaacgtcacagccagcaggaacatcagcgtcgggccaatgtactggaaaaagcctaacgttgagagacgcaagcgcgtggcagcggcggtaaaacacaacagcggtacggtagtgacaataccggcggcgatcagcagtaaattcagcgacatcgggttttgccccatatggctggttgagctgtcggcaatagcaaacaggtaaattgccgccacgggcagcagccacatggtttcgattaacatgccggtttgcgcttcaacggcaatcttcttgcgtaccagaccgtagaaggcaaaactaaatgccagtcccagcgcgataataggtagcgaaccaaaagtccacagctggactaacacgccacatatcgccagaatcaccgccagccattgcatccggcggaatcgctcgccgaggaaaatcatccccagcacaatgttcaccagcgggttaataaagtaaccaaggctcgcttccagcatatggtgattgttcaccgcccagataaacagtagccagttgccaccaatcagcacggcagagactgccagcataaaaattttctgtggcgtctgaatcagcgtttttaaataggaccactggcggcaaatgctcatcagcaccaccataaagaaaaacgaccagatcacgcgatgcgtcaggatttcatcggcgggcacgtagtaaatcaacttgaagtacgctggcgctataccccaaataaaataagcggcaagagcgagtaatacgccctgccgcgtttgttttgcatccatcgggaatactcatttttaattggtaacagcagtttacctgcttttatgtcttcaacctaccatataggtggcggtggcactggcaatataaagctgttcttcattgtgtaattcaacgcgggcgacggcgactttattgcctgcacgcaacaggctactagtagcagtaaaacgctcgcccctgcctgggcgcagataatcaacgcgaagatcaatggtccccatccgcgatagccgctggcgtagttcatcttcactgatggtttcgtggcgggttaaggtacttcccacgcacaccagaccggcggcgacatccagcgccgacgcaatgaccccgccgtgcaaaatgctttgcgcccagttgcccaccatcattggctgatttttaaaggccagctgtgcgaactctttttcgtaacgctccagttccatccccaatgcgcggttaaatggcatgtgataaacaaacatctcacccactaatttcagggcttgttcagcggtcagtacggcagacatatcatccttacacttcattggttaatgaaatgttgattttatgcttctttgttgttggtttctactttaggaagggataactaacggctatggagttaagtatgtaaaatagcccgcagaaaaatattcaccttatcaataattcgttacggagaacacgaccgatgcggactctgcagggctggttgttgccggtgtttatgttgcctatggcagtatatgcacaagaggcaacggtgaaagaggtgcatgacgcgccagcggtgcgtggcagtattatcgccaatatgctgcaggagcatgacaatccgttcacgctctatccttatgacaccaactacctcatttacacccaaaccagcgatctgaataaagaagcgattgccagttacgactgggcggaaaatgcgcgtaaggatgaagtaaagtttcagttgagcctggcatttccgctgtggcgtgggattttaggcccgaactcggtgttgggtgcgtcttatacgcaaaaatcctggtggcaactgtccaatagcgaagagtcttcaccgtttcgtgaaaccaactacgaaccgcaattgttcctcggttttgccaccgattaccgttttgcaggttggacgctgcgcgatgtggagatggggtataaccacgactctaacgggcgttccgacccgacctcccgcagctggaaccgcctttatactcgcctgatggcagaaaacggtaactggctggtagaagtgaagccgtggtatgtggtgggtaatactgacgataacccggatatcaccaaatatatgggttactaccagcttaaaatcggctatcacctcggtgatgcggtgctcagtgcgaaaggacagtacaactggaacaccggctacggcggcgcggagttaggcttaagttacccgatcaccaaacatgtgcgcctttatactcaggtttacagcggctatggcgaatcgctcatcgactataacttcaaccagacccgtgtcggtgtgggggttatgctaaacgatttgttttgatgaacggttgagtggttggcaaatctggaatccagcatccaggattaccctctcagagactaaaagcattgcagtttctcgcgcaggcgctgaaaatagcgcctgtttttatttcaggcaatcggggtgaatgtggcgcaggcggaagtgttgaatctggagtccggagctaaacaggttttacaagaaacctttggctaccaacagtttcgccccggccaggaagaaattatcgacactgtgctttccggccgcgattgcctcgtcgtcatgcccactggtggcggaaaatccctttgctatcaaatccctgccttattgctaaacggccttaccgtggttgtttcaccgctgatttcgttgatgaaagatcaggtggatcaactgcaagccaacggcgtggcggcggcgtgccttaactcgacgcaaacccgcgaacagcaacttgaagtgatgacaggctgccgcaccgggcaaattcgtctgctttatatcgccccggaacgcctgatgctggataactttcttgagcatctggcgcactggaatccggtgttattagccgttgatgaagcgcactgtatctcccaatggggccacgatttccgcccggaatatgccgcgctcggtcagttgcgccagcggttcccgacgctgccgtttatggcgctgaccgccacagccgacgacaccacgcgccaggatatcgtgcgcctgctggggctgaacgatccgctgattcaaatcagcagttttgaccgtccgaatattcgctacatgctgatggagaagttcaaaccgctcgatcagttgatgcgctacgtgcaggaacagcgcggtaagtcaggcattatctactgcaacagccgcgcgaaagtagaagacaccgctgcgcgcctgcaaagcaagggaattagcgcggcggcctatcatgccgggctggaaaataatgttcgcgccgatgtgcaggaaaaattccagcgcgatgacctgcaaattgtggtggcgacggtggcgttcggcatgggcatcaataaaccaaacgttcgcttcgtggtccactttgatattccgcgcaatatcgaatcctattatcaggaaaccggacgcgccgggcgtgatggcctgcccgcggaagcgatgctgttttacgatccggctgatatggcgtggctgcgccgttgtctggaagagaagccgcaggggcagttgcaggatatcgagcgccacaaactcaatgcgatgggcgcgtttgccgaagcgcaaacttgccgtcgtctggtattgctgaactattttggcgaagggcgtcaggagccgtgcgggaactgcgatatctgcctcgatccgccgaaacagtacgacggttcaaccgatgctcagattgccctttccaccattggtcgtgtgaatcagcggtttgggatgggttatgtggtggaagtgattcgtggtgctaataaccagcgtatccgcgactatggtcatgacaaactgaaagtctatggcatgggccgtgataaaagccatgaacattgggtgagcgtgatccgccagctgattcacctcggcctggtgacgcaaaatattgcccagcattctgccctacaactgacagaggccgcgcgcccggtgctgcgcggcgaatcctctttgcaacttgccgtgccgcgtatcgtggcgctcaaaccgaaagcgatgcagaaatcgttcggcggcaactatgatcgcaaactgttcgccaaattacgcaaactgcgtaaatcgatagccgatgaaagtaatgtcccgccgtacgtggtgtttaacgacgcaaccttgattgagatggctgaacagatgccgatcaccgccagcgaaatgctcagcgttaacggcgttgggatgcgcaagctggaacgctttggcaaaccgtttatggcgctgattcgtgcgcatgttgatggcgatgacgaagagtagtcagcagcataaaaaagtgccagtatgaagactccgtaaacgtttcccccgcgagtcaaatgtatgttgatgttatttctcaccgtcgccatggtgcacattgtggcgcttatgagccccggtcccgatttcttttttgtctctcagaccgctgtcagtcgttcccgtaaagaagcgatgatgggcgtgctgggcattacctgcggcgtaatggtttgggctgggattgcgctgcttggcctgcatttgattatcgaaaaaatggcctggctgcatacgctgattatggtgggcggtggcctgtatctctgctggatgggttaccagatgctacgtggtgcactgaaaaaagaggcggtttctgcacctgcgccacaggtcgagctggcgaaaagtgggcgcagtttcctgaaaggtttactgaccaatctcgctaatccgaaagcgattatctactttggctcggtgttctcattgtttgtcggtgataacgttggcactaccgcgcgctggggcatttttgcgctgatcattgtcgaaacgctggcgtggtttaccgtcgttgccagcctgtttgccctgccgcaaatgcgccgtggttatcaacgtctggcgaagtggattgatggttttgccggggcgttatttgccggatttggcattcatttgattatttcgcggtgatgccagacgcgtcttcagagtaagtcggataaggcgtttacgccgcatccgacattatttttcacgcatgcctcgccgatgctaacagcgctcccaccagcataaacaacgagccgaaaatcttattcagcgccttcatctgctttggtcctttaatccatagagcaatccgttgagcaagggtggcgtaaccgatcatcacaataatatcgaccacaatagtggtgacgccgagcacgatatactgcatcagttgcggctgttgcggcatgatgaattgcggaaatagcgccgccagaaacacaatacttttgggattggtgagattcacaaaaactgcgcgctggaacaaatgtcgacgcgattgagtagaggccagcgatttaaggtcaattgcaccagcggcgcgccactgctggattcccagccaaatcaagtaagccgcgcctgcccacttcaacacttcaaacgcaatcactgagcgggaaaatagcgtccccaaccccacgccaaccagcacaatatgaatcgccagtccggtctgaagcccagcaatagacgccaccgcgccgcgataaccgtggttgagcgaggtggtcatagtgttgattgcaccagagcctggcgacaggcttaaaatgatcgatgtcagcaggtaggcaaaccaccattctaaggtcatgatgaactcccggtgtgtctatttttgtgccacaatacgctactgtcgcagcgttgtgtcaggcacgctaaaaaaaacgattttacgtggtttaagaggcagattacccgatgtttcagcagcaaaaagactgggaaacaagagaaaacgcgtttgctgcttttaccatgggaccgctgactgatttctggcgtcagcgtgatgaagcagagtttactggtgtggatgacattccggtgcgctttgtccgttttcgcgcacagcaccatgaccgggtggtagtcatctgcccggggcgtattgagagctacgtaaaatatgcggaactggcctatgacctgttccatttggggtttgatgtcttaatcatcgaccatcgcgggcagggacgttccggtcgcctgttagccgatccgcatctcgggcatgttaatcgctttaatgattatgttgatgatctggcggcattctggcagcaggaggttcagcccggtccgtggcgtaaacgctatatactggcacattcgatgggcggtgcgatctccacattatttctgcaacgccatccaggtgtatgtgacgccattgcgctaactgcgccaatgtttgggatcgtgattcgtatgccgtcatttatggcacggcagatcctcaactgggccgaagcgcatccacgtttccgtgatggctatgcaataggcaccgggcgctggcgcgcgttgccgtttgctatcaacgtactgacccacagcagacagcgatatcgacgtaacttacgcttctatgctgatgacccaacgattcgcgtcggtgggccgacctaccattgggtacgcgaaagtattctggctggcgaacaggtgttagccggtgcgggtgatgacgccacgccaacgcttctcttgcaggctgaagaggaacgcgtggtggataaccgcatgcatgaccgtttttgtgaactccgcaccgccgcgggccatcctgtcgaaggaggacggccgttggtaattaaaggtgcttaccatgagatcctttttgaaaaggacgcaatgcgctcagtcgcgctccacgccatcgttgattttttcaacaggcataactcacccagcggaaaccgctctacagaggtttaaatttcttatgtaccaggttgttgcgtctgatttagatggcacgttactttctcccgaccatacgttatccccttacgccaaagaaactctgaagctgctcaccgcgcgcggcatcaactttgtgtttgcgaccggtcgtcaccacgttgatgtggggcaaattcgcgataatctggagattaagtcttacatgattacctccaatggtgcgcgcgttcacgatctggatggtaatctgatttttgctcataacctggatcgcgacattgccagcgatctgtttggcgtagtcaacgacaatccggacatcattactaacgtttatcgcgacgacgaatggtttatgaatcgccatcgcccggaagagatgcgcttttttaaagaagcggtgttccaatatgcgctgtatgagcctggattactggagccggaaggcgtcagcaaagtgttcttcacctgcgattcccatgaacaactgctgccgctggagcaggcgattaacgctcgttggggcgatcgcgtcaacgtcagtttctctaccttaacctgtctggaagtgatggcgggcggcgtttcaaaaggccatgcgctggaagcggtggcgaagaaactgggctacagcctgaaggattgtattgcgtttggtgacgggatgaacgacgccgaaatgctgtcgatggcggggaaaggctgcattatgggcagtgcgcaccagcgtctgaaagaccttcatcccgagctggaagtgattggtactaatgccgacgacgcggtgccgcattatctgcgtaaactctatttatcgtaatcgttctttatttggtcagttgtcaacctgatacttcgctacaatggatacccgttaatcaaagagttttccattgtggcgctacttatcatcaccacgattctgtgggccttctcctttagcttttatggcgagtaccttgcggggcacgtcgatagctattttgcggtgctggtgcgcgttggcctggcggcactcgtttttctgccgtttctgcgtacccgtggcaatagcctgaaaacggtcggcctgtatatgctggtgggcgcgatgcagcttggcgtgatgtatatgctgagtttccgcgcttatctctacctgacggtttccgagctgctgctgttcaccgtgctgacgccgctctacatcacgctgatttatgacatcatgagtaagcgccgtctgcgctggggctatgcctttagcgccttgctggcggtgattggtgccgggattattcgctatgatcaggtcaccgaccatttctggactggcttgctgctggtgcaactctccaatatcacttttgccattggcatggtgggttacaaacgcctgatggaaactcgcccgatgccacagcataacgcctttgcgtggttctatcttggcgcgtttctggtggcagtgattgcatggttcttgctgggaaatgcgcagaaaatgccgcaaaccacgctgcaatggggcattctggtgtttcttggcgtggtggcttccgggattggctactttatgtggaactacggcgcgacgcaggtggacgccggaacgctgggcattatgaataatatgcacgttccggcagggctgctggtaaacctggctatctggcaccaacagccgcactggccaacgtttattacaggcgcgctggtgatcctggcctcactgtgggtgcatcgtaagtgggtcgctccgcgctcttcacaaacggcagatgatcgcaggcgtgattgcgcgctgagcgaataaacgcttccgtaactggctgacgctgctcgccatcgcgcacggcggcgtacagtcggctccacaagccttcgcccagggttttggtcaccaccagaccctggcgctcaaaactctctactacccaatgcggtagcgcggcaatacccatccgcgcggcaaccatctgaatcaacaataaggtgttatcgacgcttttcagtgacgggctgacgcctgccggctgaagaaaatgccgccagacatccagtcgactacgctgcaccggataaattaatagcgtctcgctggcgagatcttccggtgtaattcgcgttttcgccgccagtggatggtcaggtgctaacaccagacgcacttcatagtcgaacatcggcgaataatgcaggccactgcgcggcagaatatcggacgtcattaccagatccagctctccctgttgcaaggcgggctgcgggtcaaatgtcacgcccgatttaaaatccatctctacctgcggccagttcttatggaaattttctaacgcgggtgtcagccactgaatacagctatggcactcaatggcaatgcgcagacgcgtctgctgcggttcattgcaggcttgcagggcctggctaatttgcggcagtacctggtttgccagttgcaacaggatttctccctgcggtgtaaagcgtagcggctggctcttacgcacaaatagccggaagccaaggcgttgttccagatcgctaaactggtgagacagggcggattgcgtctgatgcaacgtcgccgcagcggctgcgagcgagccgcagttccgcaacgcttgtagcgttttcaggtgttttacttcgatcatgaaagtccttcacttcggcatgaataatttgcgcttgaggaatatacagtaaccgccaattatggatgtgtaaacatctggacggctaaaatccttcgtcttttaaatttatggtgcgttggctgcgtttctccaccccggtcacttacttcagtaagctcccggggatgaataaacttgccgccttccctaaattcaaaatccataggatttacatataattagaggaagaaaaaatgacaatattgaatcacaccctcggtttccctcgcgttggcctgcgtcgcgagctgaaaaaagcgcaagaaagttattgggcggggaactccacgcgtgaagaactgctggcggtagggcgtgaattgcgtgctcgtcactgggatcaacaaaagcaagcgggtatcgacctgctgccggtgggcgattttgcctggtacgatcatgtactgaccaccagtctgctgctgggtaacgttccggcgcgtcatcagaacaaagatggttcggtagatatcgacaccctgttccgtattggtcgtggacgtgcgccgactggcgaacctgcggcggcagcggaaatgaccaaatggtttaacaccaactatcactacatggtgccggagttcgttaaaggccaacagttcaaactgacctggacgcagctgctggacgaagtggacgaggcgctggcgctgggccacaaggtgaaacctgtgctgctggggccggttacctggctgtggctggggaaagtgaaaggtgaacaatttgaccgcctgagcctgctgaacgacattctgccggtttatcagcaagtgctggcagaactggcgaaacgcggcatcgagtgggtacagattgatgaacccgcgctggtactggaactaccacaggcgtggctggacgcatacaaacccgcttacgacgcgctccagggacaggtgaaactgctgctgaccacctattttgaaggcgtaacgccaaatctcgacacgattactgcgctgcctgttcagggtctgcatgttgacctcgtacatggtaaagatgacgttgctgaactgcacaagcgcctgccttctgactggttgctgtctgcgggtctgatcaatggtcgtaacgtctggcgcgccgatcttaccgagaaatatgcgcaaattaaggacattgtcggcaaacgtgatttgtgggtggcatcttcctgctcgttgctgcacagccccatcgacctgagcgtggaaacgcgtcttgatgcagaagtgaaaagctggtttgccttcgccctacaaaaatgccatgaactggcactgctgcgcgatgcgctgaacagtggtgacacggcagctctggcagagtggagcgccccgattcaggcacgtcgtcactctacccgcgtacataatccggcggtagaaaagcgtctggcggcgatcaccgcccaggacagccagcgtgcgaatgtctatgaagtgcgtgctgaagcccagcgtgcgcgttttaaactgccagcgtggccgaccaccacgattggttccttcccgcaaaccacggaaattcgtaccctgcgtctggatttcaaaaagggcaatctcgacgccaacaactaccgcacgggcattgcggaacatatcaagcaggccattgttgagcaggaacgtttgggactggatgtgctggtacatggcgaggccgagcgtaatgacatggtggaatactttggcgagcacctcgacggatttgtctttacgcaaaacggttgggtacagagctacggttcccgctgcgtgaagccaccgattgtcattggtgacattagccgcccggcaccgattaccgtggagtgggcgaagtatgcgcaatcgctgaccgacaaaccggtgaaagggatgctgacggggccggtgaccatactctgctggtcgttcccgcgtgaagatgtcagccgtgaaaccatcgccaaacagattgcgctggcgctgcgtgatgaagtggccgatctggaagccgctggaattggcatcatccagattgacgaaccggcgctgcgcgaaggtttaccgctgcgtcgtagcgactgggatgcgtatctccagtggggcgtagaggccttccgtatcaacgccgccgtggcgaaagatgacacacaaatccacactcacatgtgttattgcgagttcaacgacatcatggattcgattgcggcgctggacgcagacgtcatcaccatcgaaacctcgcgttccgacatggagttgctggagtcgtttgaagagtttgattatccaaatgaaatcggtcctggcgtctatgacattcactcgccaaacgtaccgagcgtggaatggattgaagccttgctgaagaaagcggcaaaacgcattccggcagagcgcctgtgggtcaacccggactgtggcctgaaaacgcgcggctggccagaaacccgcgcggcactggcgaacatggtgcaggcggcgcagaacttgcgtcgggggtaaaatccaaaccgggtggtaataccacccggtcttttctcattacagcgacttcttcccaccatactgcttaaaccattccagcatacgctgccagccatcttctgcagatgcggcatgatagctcgggcgataatcagcgttgaatgcatgcccggcgtccgggtacacgataatctctgctttcgcattagcagcccgcagcgcctggcgcatggtttcaacgctctcctgcggaatgctgttatcctgaccaccatataagccgagaatcggcgcgttaagatcggttgcgatatcaacaggttgtttcggtgaattcagcgacttgtcgcccgtcagtttgccgtaccacgccactgcggcttttagctgtggattatgcgcggcatacagccaggtgatacgtccaccccagcagaatccggtgatcattaaacgatgaacatcgccgccgttgcgggaagcccaactggcgacatgatcgagatcggccagcacctgcgagtcaggcacttttgctaccagaccgctaagcaacgtggggatatcggcaaaatcattcggatcgccttcgcggaagtaaagttcaggtgcgatagccagatacccctccagcgccagacggcgacaaatgtcgcggatatgttcatgcacgccaaaaatttcctgcactacaatgaccactggcagtgggccatcgctttgctttggtctggcatggtaagcaggcatgttatccccttgtgaagggatagaggtgaagcccgccacaatcgcgtcgtccggggtctgaacgatggtcgaagcgagaggcgatgcagcaggtgcaaatccagattgttgtgttgttgccatggtattctccgtacccttataaaaatgttgcgcaatgttaactatagtcagcatgcaacaaatcacattgcctgaatcggctcatcttttatgcagtcctgcagaatgaagggtgatttatgtgatttgcatcacttttggtgggtaaatttatgcaacgcatttgcgtcatggtgatgagtatcacgaaaaaatgttaaacccttcggtaaagtgtctttttgcttcttctgactaaaccgattcacagaggagttgtatatgtccaagtctgatgtttttcatctcggcctcactaaaaacgatttacaaggggctacgcttgccatcgtccctggcgacccggatcgtgtggaaaagatcgccgcgctgatggataagccggttaagctggcatctcaccgcgaattcactacctggcgtgcagagctggatggtaaacctgttatcgtctgctctaccggtatcggcggcccgtctacctctattgctgttgaagagctggcacagctgggcattcgcaccttcctgcgtatcggtacaacgggcgctattcagccgcatattaatgtgggtgatgtcctggttaccacggcgtctgtccgtctggatggcgcgagcctgcacttcgcaccgctggaattcccggctgtcgctgatttcgaatgtacgactgcgctggttgaagctgcgaaatccattggcgcgacaactcacgttggcgtgacagcttcttctgataccttctacccaggtcaggaacgttacgatacttactctggtcgcgtagttcgtcactttaaaggttctatggaagagtggcaggcgatgggcgtaatgaactatgaaatggaatctgcaaccctgctgaccatgtgtgcaagtcagggcctgcgtgccggtatggtagcgggtgttatcgttaaccgcacccagcaagagatcccgaatgctgagacgatgaaacaaaccgaaagccatgcggtgaaaatcgtggtggaagcggcgcgtcgtctgctgtaattctcttctcctgtctgaaggccgacgcgttcggccttttgtatttttgcgtagcgcctcgcaggaaatgcctttccaactggacgtttgtacagcacaattctattttgtgcgggtaagttgttgcgtcaggaggcgttgtggatttctcaatcatggtttacgcagttattgcgttggtgggtgtggcaattggctggctgtttgccagttatcaacatgcgcagcaaaaagccgagcaattagctgaacgtgaagagatggtcgcggagttaagcgcggcaaaacaacaaattacccaaagcgagcactggcgtgcagagtgcgagttactcaataacgaagtgcgcagcctgcaaagtattaacacctctctggaggccgatctgcgtgaagtaaccacgcggatggaagccgcacagcaacatgctgacgataaaattcgccagatgattaacagcgagcagcgcctcagtgagcagtttgaaaacctcgccaaccgtatttttgagcacagcaatcgccgggttgatgagcaaaaccgtcagagtctgaacagcctgttgtcgccgctacgtgaacaactggacggtttccgccgtcaggttcaggacagcttcggtaaagaagcacaagaacgccataccctgacccacgaaattcgcaatctccagcaactcaacgcgcaaatggcccaggaagcgatcaacctgacgcgcgcgctgaaaggcgacaataaaacccagggcaactggggcgaggtagtattgacgcgggtgctggaggcttccggtctgcgtgaagggtatgaatatgaaacccaggtcagcatcgaaaatgacgcccgctcgcggatgcagccggatgtcatcgtgcgcctgccgcagggaaaagatgtggtgatcgacgccaaaatgacgctggtcgcctatgaacgctattttaacgccgaagacgactacacccgcgaaagcgcgctacaggaacatatcgcgtcggtgcgtaaccatatccgtttgctgggacgcaaagattatcaacagctgccggggctgcgaactctggattacgtgctgatgtttattcccgttgaacccgcttttttactggcgcttgaccgccagccggagctgatcaccgaagcgttgaaaaacaacatcatgctggttagcccgactacgctgctggtggcgctgcgcactatcgccaacctgtggcgttatgagcatcaaagccgcaacgcccagcaaatcgccgatcgtgccagcaagctgtacgacaagatgcgtttgttcatcgatgacatgtccgcgattggtcaaagtctcgacaaagcgcaggataattatcggcaggcaatgaaaaaactctcttcagggcgcggaaatgtgctggcgcaggcagaagcgtttcgcggtttaggagtagaaattaaacgcgagattaatccggatttggctgaacaggcggtgagccaggatgaagagtatcgacttcggtcggttccggagcagccgaatgatgaagcttatcaacgcgatgatgaatataatcagcagtcgcgctagcccattgggagtagttaagccgggtagaaatctagggcatcgacgcccaatctgttacacttctggaacaattttttgatgagcaggcattgagatggtggataagtcacaagaaacgacgcactttggttttcagaccgtcgcgaaggaacaaaaagcggatatggtcgcccacgttttccattccgtggcatcaaaatacgatgtcatgaatgatttgatgtcatttggtattcatcgtttgtggaagcgattcacgattgattgcagcggcgtacgccgtgggcagaccgtgctggatctggctggtggcaccggcgacctgacagcgaaattctcccgcctggtcggagaaactggcaaagtggtccttgctgatatcaatgaatccatgctcaaaatgggccgcgagaagctgcgtaatatcggtgtgattggcaacgttgagtatgttcaggcgaacgctgaggcgctgccgttcccggataacacctttgattgcatcaccatttcgtttggtctgcgtaacgtcaccgacaaagataaagcactgcgttcaatgtatcgcgtgctgaaacccggcggccgcctgctggtgcttgagttctcgaagccaattatcgagccgctgagcaaagcctatgatgcatactccttccatgtgctgccgcgtattggctcactggtcgcgaacgacgccgacagctaccgttatctggcagaatccatccgtatgcatcccgatcaggataccctgaaagccatgatgcaggatgccggattcgaaagtgtcgactactacaatctgacggcaggggttgtggcgctgcatcgtggttataagttctgacaggagaccggaaatgccttttaaacctttagtgacggcaggaattgaaagtctgctcaacaccttcctgtatcgctcacccgcgctgaaaacggcccgctcgcgtctgctgggtaaagtattgcgcgtggaggtaaaaggcttttcgacgtcattgattctggtgttcagcgaacgccaggttgatgtactgggcgaatgggcaggcgatgctgactgcaccgttatcgcctacgccagtgtgttgccgaaacttcgcgatcgccagcagcttaccgcactgattcgcagtggtgagctggaagtgcagggcgatattcaggtggtgcaaaacttcgttgcgctggcagatctggcagagttcgaccctgcggaactgctggccccttataccggtgatatcgccgctgaaggaatcagcaaagccatgcgcggaggcgcaaagttcctgcatcacggcattaagcgccagcaacgttatgtggcggaagccattactgaagagtggcgtatggcacccggtccgcttgaagtggcctggtttgcggaagagacggctgccgtcgagcgtgctgttgatgccctgaccaaacggctggaaaaactggaggctaaatgacgccaggtgaagtacggcgcctatatttcatcattcgcacttttttaagctacggacttgatgaactgatccccaaaatgcgtatcaccctgccgctacggctatggcgatactcattattctggatgccaaatcggcataaagacaaacttttaggtgagcgactacgactggccctgcaagaactggggccggtttggatcaagttcgggcaaatgttatcaacccgccgcgatctttttccaccgcatattgccgatcagctggcgttattgcaggacaaagttgctccgtttgatggcaagctggcgaagcagcagattgaagctgcaatgggcggcttgccggtagaagcgtggtttgacgattttgaaatcaagccgctggcttctgcttctatcgcccaggttcataccgcgcgattgaaatcgaatggtaaagaggtggtgattaaagtcatccgcccggatattttgccggttattaaagcggatctgaaacttatctaccgtctggctcgctgggtgccgcgtttgctgccggatggtcgccgtctgcgcccaaccgaagtggtgcgcgagtacgaaaagacattgattgatgaactgaatttgctgcgggaatctgccaacgccattcagcttcggcgcaattttgaagacagcccgatgctctacatcccggaagtttaccctgactattgtagtgaagggatgatggtgatggagcgcatttacggcattccggtgtctgatgttgcggcgctggagaaaaacggcactaacatgaaattgctggcggaacgcggcgtgcaggtgttcttcactcaggtctttcgcgacagctttttccatgccgatatgcaccctggcaacatcttcgtaagctatgaacacccggaaaacccgaaatatatcggcattgattgcgggattgttggctcgctaaacaaagaagataaacgctatctggcagaaaactttatcgccttctttaatcgcgactatcgcaaagtggcagagctacacgtcgattctggctgggtgccaccagataccaacgttgaagagttcgaatttgccattcgtacggtctgtgaacctatctttgagaaaccgctggccgaaatttcgtttggacatgtactgttaaatctgtttaatacggcgcgtcgcttcaatatggaagtgcagccgcaactggtgttactccagaaaaccctgctctacgtcgaaggggtaggacgccagctttatccgcaactcgatttatggaaaacggcgaagcctttcctggagtcgtggattaaagatcaggtcggtattcctgcgctggtgagagcatttaaagaaaaagcgccgttctgggtcgaaaaaatgccagaactgcctgaattggtttacgacagtttgcgccagggcaagtatttacagcacagtgttgataagattgcccgcgagcttcagtcaaatcatgtacgtcagggacaatcgcgttattttctcggaattggcgctacgttagtattaagtggcacattcttgttggtcagccgacctgaatgggggctgatgcccggctggttaatggcaggtggtctgatcgcctggtttgtcggttggcgcaaaacacgctgattttttcatcgctcaaggcgggccgtgtaacgtataatgcggctttgtttaatcatcatctaccacagaggaacatgtatgggtggtatcagtatttggcagttattgattattgccgtcatcgttgtactgctttttggcaccaaaaagctcggctccatcggttccgatcttggtgcgtcgatcaaaggctttaaaaaagcaatgagcgatgatgaaccaaagcaggataaaaccagtcaggatgctgattttactgcgaaaactatcgccgataagcaggcggatacgaatcaggaacaggctaaaacagaagacgcgaagcgccacgataaagagcaggtgtaatccgtgtttgatatcggttttagcgaactgctattggtgttcatcatcggcctcgtcgttctggggccgcaacgactgcctgtggcggtaaaaacggtagcgggctggattcgcgcgttgcgttcactggcgacaacggtgcagaacgaactgacccaggagttaaaactccaggagtttcaggacagtctgaaaaaggttgaaaaggcgagcctcactaacctgacgcccgaactgaaagcgtcgatggatgaactacgccaggccgcggagtcgatgaagcgttcctacgttgcaaacgatcctgaaaaggcgagcgatgaagcgcacaccatccataacccggtggtgaaagataatgaagctgcgcatgagggcgtaacgcctgccgctgcacaaacgcaggccagttcgccggaacagaagccagaaaccacgccagagccggtggtaaaacctgctgcggacgctgaaccgaaaaccgctgcaccttccccttcgtcgagtgataaaccgtaaacatgtctgtagaagatactcaaccgcttatcacgcatctgattgagctgcgtaagcgtctgctgaactgcattatcgcggtgatcgtgatattcctgtgtctggtctatttcgccaatgacatctatcacctggtatccgcgccattgatcaagcagttgccgcaaggttcaacgatgatcgccaccgacgtggcctcgccgttctttacgccgatcaagctgacctttatggtgtcgctgattctgtcagcgccggtgattctctatcaggtgtgggcatttatcgccccagcgctgtataagcatgaacgtcgcctggtggtgccgctgctggtttccagctctctgctgttttatatcggcatggcattcgcctactttgtggtctttccgctggcatttggcttccttgccaataccgcgccggaaggggtgcaggtatccaccgacatcgccagctatttaagcttcgttatggcgctgtttatggcgtttggtgtctcctttgaagtgccggtagcaattgtgctgctgtgctggatggggattacctcgccagaagacttacgcaaaaaacgcccgtatgtgctggttggtgcattcgttgtcgggatgttgctgacgccgccggatgtcttctcgcaaacgctgttggcgatcccgatgtactgtctgtttgaaatcggtgtcttcttctcacgcttttacgttggtaaagggcgaaatcgggaagaggaaaacgacgctgaagcagaaagcgaaaaaactgaagaataaattcaaccgcccgtcagggcggttgtcatatggagtacaggatgtttgatatcggcgttaatttgaccagttcgcaatttgcgaaagaccgtgatgatgttgtagcgtgcgcttttgacgcgggagttaatgggctactcatcaccggcactaacctgcgtgaaagccagcaggcgcaaaagctggcgcgtcagtattcgtcctgttggtcaacggcgggcgtacatcctcacgacagcagccagtggcaagctgcgactgaagaagcgattattgagctggccgcgcagccagaagtggtggcgattggtgaatgtggtctcgactttaaccgcaacttttcgacgccggaagagcaggaacgcgcttttgttgcccagctacgcattgccgcagatttaaacatgccggtatttatgcactgtcgcgatgcccacgagcggtttatgacattgctggagccgtggctggataaactgcctggtgcggttcttcattgctttaccggcacacgcgaagagatgcaggcgtgcgtggcgcatggaatttatatcggcattaccggttgggtttgcgatgaacgacgcggactggagctgcgggaacttttgccgttgattccggcggaaaaattactgatcgaaactgatgcgccgtatctgctccctcgcgatctcacgccaaagccatcatcccggcgcaacgagccagcccatctgccccatattttgcaacgtattgcgcactggcgtggagaagatgccgcatggctggctgccaccacggatgctaatgtcaaaacactgtttgggattgcgttttagagtttgcggaactcggtattcttcacactgtgcttaatctctttattaataagattaagcaatagcatggagcgagcctcaccatcgggttcggtgaaaatggcctgaaagccttcgaacgcgccttcggtaataatcaccttatcacccggataaggggttgccggatcgacaatgtctttcggtttatataccgatagctgatgaataaccgccgatgggactatcgctggcgacgcgccaaagcgcacgaagtggctgacaccgcgggtcgcgttgatagtcgtggtatgaatcacttctgggtcaaattccacaaacaggtagttggggaacaatggctcactgactgcagtacgttttccacgcacgattttttccagggtgatcatcggtgccaggcaattcacagcctgtctttcgaggtgttcctgggcacgttgaagttgcccgcgcttgcagtacagtaaataccaggattgcataatgactcttatccgtttaatcggggcgcaaggatagcaaaagctttacgctaagttaattatattccccggtttgcgttataccgtcagagttcacgctaatttaacaaatttacagcatcgcaaagatgaacgccgtataatgggcgcagattaagaggctacaatggacgccatgaaatataacgatttacgcgacttcttgacgctgcttgaacagcagggtgagctaaaacgtatcacgctcccggtggatccgcatctggaaatcactgaaattgctgaccgcactttgcgtgccggtgggcctgcgctgttgttcgaaaaccctaaaggctactcaatgccggtgctgtgcaacctgttcggtacgccaaagcgcgtggcgatgggcatggggcaggaagatgtttcggcgctgcgtgaagttggtaaattattggcgtttctgaaagagccggagccgccaaaaggtttccgcgacctgtttgataaactgccgcagtttaagcaagtattgaacatgccgacaaagcggctgcgtggtgcgccctgccaacaaaaaatcgtctctggcgatgacgtcgatctcaatcgcattcccattatgacctgctggccggaagatgccgcgccgctgattacctgggggctgacagtgacgcgcggcccacataaagagcggcagaatctgggcatttatcgccagcagctgattggtaaaaacaaactgattatgcgctggctgtcgcatcgcggcggcgcgctggattatcaggagtggtgtgcggcgcatccgggcgaacgtttcccggtttctgtggcgctgggtgccgatcccgccacgattctcggtgcagtcactcccgttccggatacgctttcagagtatgcgtttgccggattgctacgtggcaccaagaccgaagtggtgaagtgtatctccaatgatcttgaagtgcccgccagtgcggagattgtgctggaagggtatatcgaacaaggcgaaactgcgccggaagggccgtatggcgaccacaccggttactataatgaagtcgatagtttcccggtatttaccgtgacgcatattacccagcgtgaagatgcgatttaccattccacctataccgggcgtccgccagatgagcccgcggtgctgggtgtcgcactgaacgaagtgtttgtgccgattctgcaaaaacagttcccggaaattgtcgatttttacctgccgccggaaggctgctcttatcgcctggcggtagtgacaatcaaaaaacagtacgccggacacgcgaagcgcgtcatgatgggcgtctggtcgttcttacgccagtttatgtacactaaatttgtgatcgtttgcgatgatgacgttaacgcacgcgactggaacgatgtgatttgggcgattaccacccgtatggacccggcgcgggatactgttctggtagaaaatacgcctattgattatctggattttgcctcgcctgtctccgggctgggttcaaaaatggggctggatgccacgaataaatggccgggggaaacccagcgtgaatggggacgtcccatcaaaaaagatccagatgttgtcgcgcatattgacgccatctgggatgaactggctatttttaacaacggtaaaagcgcctgatgcgcgtttgttttgccctatttatcgatccgacagagaaagcgcatgacaaccttaagctgtaaagtgacctcggtagaagctatcacggataccgtatatcgtgtccgcatcgtgccagacgcggccttttcttttcgtgctggtcagtatttgatggtagtgatggatgagcgcgacaaacgtccgttctcaatggcttcgacgccggatgaaaaagggtttatcgagctgcatattggcgcttctgaaatcaacctttacgcgaaagcagtcatggaccgcatcctcaaagatcatcaaatcgtggtcgacattccccacggagaagcgtggctgcgcgatgatgaagagcgtccgatgattttgattgcgggcggcaccgggttctcttatgcccgctcgattttgctgacagcgttggcgcgtaacccaaaccgtgatatcaccatttactggggcgggcgtgaagagcagcatctgtatgatctctgcgagcttgaggcgctttcgttgaagcatcctggtctgcaagtggtgccggtggttgaacaaccggaagcgggctggcgtgggcgtactggcaccgtgttaacggcggtattgcaggatcacggtacgctggcagagcatgatatctatattgccggacgttttgagatggcgaaaattgcccgcgatctgttttgcagtgagcgtaatgcgcgggaagatcgcctgtttggcgatgcgtttgcatttatctgagatataaaaaaacccgcccctgacaggcgggaagaacggcaactaaactgttattcagtggcatttagatctatgacgtatctggcaaaccatgcccgatgcgacgctgtcgcgtcttatcgtgcctacaaatagtccgaaccgtaggccggataaggcgtttacgccgcatccggcaattggtgcatgatgcctgatgcgacgctgtcgcgtcttatcgtgcctacaaatagtccgaaccgtaggccggataaggcgtttacgccgcatccggcaattggtgcatgatgcctgatgcgacgctggcgcgtcttatcaggcctacattggtgccggatcggtagaccggataaggcgttcacgccgcatccggcaagtggttaaacccgctcaaacaccgtcgcaataccctgacccagaccgatacacatcgtcgccagaccaaactgaacgtctttgcgttccatcagattcagcagcgtggtgctgatacgcgcaccggaacaacccagcggatgacccagcgcgatcgcgccaccgttgaggttgatcttctcgtcaatctgctcaattagtcccagatctttaatacatggcaggatctgcgcggcaaaggcttcgttcatttcaaacacgccgatatcgctggcagaaagccccgcttttttcagcgccagtttcgaggccggaaccgggccgtaacccataatcgatgggtcacaaccaacgaccgccatcgaacgcacacgagcgcgcggcttaagacctaattcatgggcgcggctttcactcatcaccagcatggcagctgcgccatcggaaagtgcagaagatgtgcccgccgttaccataccgtttactggatcaaacgccggacgcagcgtggcgagggcttccacggtggtttccgggcgaatcacttcgtcgtaattaaactgcttcaggacgccgtcggcatcgtgaccaccggtcgggatgatttcatttttaaatgcggccgactgcgtggcggcccaggcgcgggcgtgtgaccgcgcggcaaaggcatcctgcatttcacggctgataccgtgcatacgcgccagcatttctgccgttaagcccatcatgcccgccgctttggcgacattgcggctcaggccggggtgaaaatcgacgccgtgactcatcggcacatggcccatatgctccacgccgccaaccagacatgcctgcgcatcgccagtcatgatcattcgtgctgcgtcatgcagtgcctgcatggatgaaccacacaagcgattaacggtaaccgccgggacagagtgtggtacttctgccagcagcgccgcgttacgggcgatattaaaaccctgctccagcgtctgctgcacacaaccccagtaaatatcgtcgagggccgccgcttccagcgccgggttacgcgccagcaggctacgcattaaatgagcggagagatcttctgcacgcacgttacgaaaagcaccgcccttcgaacggcccatcggggtgcgaattgcatcgacaatgacaacctgttccattgtgactccttaagccgttttcaggtcgccaaccggacgggctggctcaaccggaggatagtacggttcgttatgacgcgctttattacgcagaccttccggcacttcatacagcgggccgaggtgctgatattgctgtgccatatcgaggtattttgcgctaccgagggtgtccagccagcggaacgcgccgccgtggaacggagggaagcccaggccgtagaccagcgccatatccgcttccgccggagtggcgataatgccttcctccagacagcgcaccacttcgttgaccatcgggatcatcatgcgggcgataatctcttcttcgctgaaatcgcgcttcggctggctcacttctgccagcaggtcttcaacggcggcgtcttcttctttcttcggcttacctttgctgtcttctttataacgccagaaaccgaggccgttcttctgaccaaagcggttggcatcaaacagcgcgtcgatggcatcgcggtaatctttctgcatccgctgcgggaagcctgctgccatgacagcctgagcgtgatgcgcggtatcaatgcccacaacgtccagcagatatgccgggcccatcggccagccaaactgtttttccatcactttgtcgatcttgcggaaatccgcgccgtcgcgcagcagctggctgaaaccggcgaaatacgggaacagcacgcggttaacaaagaagccggggcagtcgttaaccacaatcggcgtcttgcccatcttgctcgcccaggcgacaactttcgcgatggtttcgtcggagcttttctcgccgcgaataatttctaccaacggcattcggtggaccgggttaaagaagtgcatcccgcagaagttttccgggcgttccagcgcgttggccagttcgctgataggaatggttgaagtgttagacgccagcacggtatcctggcgtactttttgttcggtttctgccagtacggcttttttcactttcgggttttcaacaaccgcttctaccacaatatccacgcggtcaaatccggcgtagtcgagcgttgggtggattgtggagatcacgccagccagtttcagaccatcgatcttgccgcgctcaagctgcttgttcagcagtttcgcggcttcggtcatgccgagggttaacgacttgtcgttgatatctttcatgacaaccggcacgcctttccacgcagactggtaagcgatgccgccgcccataatgcctgcacccagcaccgcggcctgtttcggggtttcaacgtctttggtgagtttcttcgctttgccttttacatattgatcgttaaggaaaatgccgaccagtgcgcgggcttcgttggtatgcgccagcgggacaaaacttttgttttccaggtttaaggcttcttcacgaccaaaacgggccgcagcttcaatggtttttactgcggtgatgggggccggataatgtttccccgctgtttgtgcgaccatccctttagcgatggtgaagctcatggtggcttcaatcttgctcagttttagtggttccagcttcggctgacgttttgctttccagtcgaggtcgccgttaatggcctggcgtaaaaccgcctttgcgccttcaaccagtttttctgctttgactacgccatccaccagaccgattttcagcgcctgatccgcgccgacatctttaccggcggcaatgatttccagcgcactgtcagcgcccagcatacgtggcatacgtacagaaccgccaaagccaggcatgatgcccagtttggtttccggcagaccgatgcgcagatccggcgtcgccagacgataatcggtcgccagcacgcattcgcagccaccgcccagcgcatagccattgacggcagcaatggtcggcaccggcagatcttccaggcgattaaacacgctattggcaaagtgcagccactgacttaactgttcttcaggaacgaggaacagggacaaaaattcggtgatatcagcaccgacgataaaggctgctttgttcgaacgcagcagcagcccttttagatctgattgctgttccagcacgccgatggcctcgccgaggctggcgacggtcgcagtgtcgagtttattaactgaacctggggcatcaaataccagttcggcaatgccatcttccagccagtcaaggtacagggtgtcgcctttgtaaagcatgtcagtctcctgaatccgcaaggtgatctggtcgtaccagatgagtcgaagtgtgtattttgtgttaaaaatatgcaaacaaaagattaaagaaatgccgatctgatcacgctcggcagaaatcacgctctggatgaacgatgtgctaagatgcggagacttaaggtcaaaaaaacagaagggtaaaaaatggaatcactggcctcgctctataaaaatcatatagctaccttacaagaacggactcgcgatgcgctggcgcgcttcaagctggatgcgttacttattcactccggcgagctgttcaatgtttttctcgacgatcatccctatccgtttaaagtgaacccgcaattcaaagcgtgggtgccggtaactcaggtgccaaactgctggttgctggtggatggcgtgaacaagccgaaactgtggttctatctgccggttgattactggcacaacgtcgaaccgctgccgacctctttctggactgaagatgtggaagtgatcgcgctgccgaaagccgatggcattggtagcctgctgcctgctgcgcgcggcaatatcggttatatcggtccggtgccggaacgtgcgctgcaactgggtattgaggccagcaacatcaacccgaaaggggttatcgactacctgcattactatcgctccttcaaaactgagtacgaactggcctgtatgcgtgaagcgcagaaaatggcggtcaacggtcaccgcgcggcagaagaagcgttccgttctggcatgagcgagttcgatatcaacattgcctatctgaccgcgaccggtcatcgtgataccgacgtaccttacagcaacattgtggcgcttaacgaacacgctgcggtactgcattacaccaaactggaccatcaggcaccggaagagatgcgcagcttcctgctggatgccggggcagaatataacggctatgcggctgacctgacccgtacctggtcggcaaaaagtgacaacgactacgcgcagctggtgaaggacgttaatgatgaacaactggcgctgatcgccaccatgaaagcaggcgtcagctatgtggattaccacatccagttccatcagcgcatcgccaaactgctgcgtaaacatcaaatcatcaccgatatgagtgaagaagcgatggtcgaaaacgatcttaccgggccgtttatgccgcatggtatcggccatccgctgggcctgcaggtgcatgacgtcgctggttttatgcaggatgatagcggtacgcacctcgcggcaccggcaaaatatccgtacctgcgctgcacccgtattctccagccgggcatggtgttaaccatcgaaccgggtatctacttcatcgaatcgctactggcaccgtggcgtgaagggcagttcagcaagcacttcaactggcagaaaattgaagcactgaaaccgttcggcggcattcgtatcgaagacaacgtggtgatccacgaaaacaacgtggaaaacatgacccgggatctgaaactggcgtgatggaaagctggttaattcctgcggcaccggtcacggtcgttgaagagatcaaaaagagccgcttcataacgatgttggcgcataccgatggcgttgaggcggcgaaagcgtttgttgaatcggtgcgggcagaacaccccgatgcccggcaccattgcgtggcgtgggtcgcgggtgcgccggatgattctcaacagctgggtttctctgacgacggggagccggcgggaacggcaggtaaaccgatgctcgcccagctaatgggcagcggcgtcggggaaattaccgctgtggtagtgcgctactacggcggcatattgcttggcaccggtgggttagtgaaagcgtatggcggcggcgtgaatcaggcgctgcgccagctaacgacccaacgcaagacgccattaaccgaatatactttgcaatgtgaatatcatcagttaaccggcattgaagcgttgctggggcagtgtgacggcaaaattatcaacagtgattatcaggcattcgttctgctgcgggtggcgcttccggcggcgaaagtggctgaattttccgcaaagctggcggattttagccgtggttcattgcaattgttagcgattgaagaataatccccacttcgttttgcagaactaaggaagcggcagagatgcattttcgcgccattacccgaatcgttggactactggtcatcttattttcagggaccatgattatccctgggctggtagcactcatctaccgggatggagcgggccgcgcttttacccagaccttttttgtcgccctcgccattggctctatgctgtggtggccgaaccgcaaagagaaaggcgaacttaaatcccgtgaggggtttctgatagtggtgctgttctggaccgtgctgggtagcgtcggtgcgctcccttttatcttctcggaaagcccgaacctcacgattaccgatgcgttttttgaatctttctctggcctgaccactacgggagccactacgctggtggggctggattcgctccctcacgccatcctcttttatcgccagatgctgcaatggtttggcgggatggggatcatcgtgttggcggttgcgatactgcctatcctcggcgtgggtgggatgcagctctatcgcgcagaaatgcccggcccgctgaaagataacaaaatgcgcccgcgaattgcggaaacggcgaaaaccctgtggttgatttatgtcttgctgaccgtcgcctgtgcgctggcgttgtggtttgccggaatggatgcctttgatgccatcggccatagctttgcgactatcgctattggcggcttctcgacacatgatgccagtatcggttatttcgatagcccgactattaacactatcattgctatcttcctgctgatctccggctgtaactacggtctgcacttttcactgttaagtgggcgtagtctgaaggtttattggcgcgatccggaatttcgcatgtttatcggcgtacagtttacgctggtggttatttgtaccctcgtactgtggtttcataatgtctacagttcggcgctgatgacaattaaccaggcgtttttccaggtggtgtcgatggcgacaaccgccgggtttacaactgacagcattgcccgctggccgctctttttgccggtactgcttttatgttcagcctttatcggcggttgcgccgggtcaacgggcggtggcctgaaggtgatccgcatcctgctgctgtttaagcaggggaaccgtgagctgaaacgactggtgcatccgaacgccgtctatagcattaagctggggaatcgcgcactgccggaacgtatcctcgaagccgtttggggatttttctccgcctatgcattggtgtttattgtcagtatgctggcgattatcgccacgggcgtggatgacttttctgcctttgcgtcggttgttgcgacattgaataacctggggccagggcttggcgtggttgctgataactttaccagtatgaacccggtggctaaatggatcctgattgccaacatgctgtttggtcgtctcgaggtctttacattgctggtgctctttaccccgactttctggcgtgaatgatggagtaatacgtgaaaacattaattcttttctcaacaagggacggacaaacgcgcgagattgcctcctacctggcttcggaactgaaagaactggggatccaggcggatgtcgccaatgtgcaccgcattgaagaaccacagtgggaaaactatgaccgtgtggtcattggtgcttctattcgctatggtcactaccattcagcgttccaggaatttgtcaaaaaacatgcgacgcggctgaattcgatgccgagcgccttttactccgtgaatctggtggcgcgcaaaccggagaagcgtactccacagaccaacagctacgcgcgcaagtttctgatgaactcgcaatggcgtcccgatcgctgcgcggtcattgccggggcgctgcgttacccacgttatcgctggtacgaccgttttatgatcaagctgattatgaagatgtcaggcggtgaaacggatacgcgcaaagaagttgtctataccgattgggagcaggtggcgaatttcgcccgagaaatcgcccatttaaccgacaaaccgacgctgaaataagcataaagaataaaaaatgcgcggtcagaaaattattttaaatttcctcttgtcaggccggaataactccctataatgcgccaccactgacacggaacaacggcaaacacgccgccgggtcagcggggttctcctgagaactccggcagagaaagcaaaaataaatgcttgactctgtagcgggaaggcgtattatgcacaccccgcgccgctgagaaaaagcgaagcggcactgctctttaacaatttatcagacaatctgtgtgggcactcgaagatacggattcttaacgtcgcaagacgaaaaatgaataccaagtctcaagagtgaacacgtaattcattacgaagtttaattctttgagcgtcaaacttttaaattgaagagtttgatcatggctcagattgaacgctggcggcaggcctaacacatgcaagtcgaacggtaacaggaagaagcttgcttctttgctgacgagtggcggacgggtgagtaatgtctgggaaactgcctgatggagggggataactactggaaacggtagctaataccgcataacgtcgcaagaccaaagaggggtaccttcgggcctcttgccatcggatgtgcccagatgggattagctagtaggtggggtaacggctcacctaggcgacgatccctagctggtctgagaggatgaccagccacactggaactgagacacggtccagactcctacgggaggcagcagtggggaatattgcacaatgggcgcaagcctgatgcagccatgccgcgtgtatgaagaaggccttcgggttgtaaagtactttcagcggggaggaagggagtaaagttaatacctttgctcattgacgttacccgcagaagaagcaccggctaactccgtgccagcagccgcggtaatacggagggtgcaagcgttaatcggaattactgggcgtaaagcgcacgcaggcggtttgttaagtcagatgtgaaatccccgggctcaacctgggaactgcatctgatactggcaagcttgagtctcgtagaggggggtagaattccaggtgtagcggtgaaatgcgtagagatctggaggaataccggtggcgaaggcggccccctggacgaagactgacgctcaggtgcgaaagcgtggggagcaaacaggattagataccctggtagtccacgccgtaaacgatgtcgacttggaggttgtgcccttgaggcgtggcttccggagctaacgcgttaagtcgaccgcctggggagtacggccgcaaggttaaaactcaaatgaattgacgggggcccgcacaagcggtggagcatgtggtttaattcgatgcaacgcgaagaaccttacctggtcttgacatccacggaagttttcagagatgagaatgtgccttcgggaaccgtgagacaggtgctgcatggctgtcgtcagctcgtgttgtgaaatgttgggttaagtcccgcaacgagcgcaacccttatcctttgttgccagcggtccggccgggaactcaaaggagactgccagtgataaactggaggaaggtggggatgacgtcaagtcatcatggcccttacgaccagggctacacacgtgctacaatggcgcatacaaagagaagcgacctcgcgagagcaagcggacctcataaagtgcgtcgtagtccggattggagtctgcaactcgactccatgaagtcggaatcgctagtaatcgtggatcagaatgccacggtgaatacgttcccgggccttgtacacaccgcccgtcacaccatgggagtgggttgcaaaagaagtaggtagcttaaccttcgggagggcgcttaccactttgtgattcatgactggggtgaagtcgtaacaaggtaaccgtaggggaacctgcggttggatcacctccttaccttaaagaagcgttctttgaagtgctcacacagattgtctgatgaaaatgagcagtaaaacctctacaggcttgtagctcaggtggttagagcgcacccctgataagggtgaggtcggtggttcaagtccactcaggcctaccaaatttgcacggcaaatttgaagaggttttaactacatgttatggggctatagctcagctgggagagcgcctgctttgcacgcaggaggtctgcggttcgatcccgcatagctccaccatctctgtagtgattaaataaaaaatacttcagagtgtacctgcaaaggttcactgcgaagttttgctctttaaaaatctggatcaagctgaaaattgaaacactgaacaacgaaagttgttcgtgagtctctcaaattttcgcaacacgatgatgaatcgaaagaaacatcttcgggttgtgaggttaagcgactaagcgtacacggtggatgccctggcagtcagaggcgatgaaggacgtgctaatctgcgataagcgtcggtaaggtgatatgaaccgttataaccggcgatttccgaatggggaaacccagtgtgtttcgacacactatcattaactgaatccataggttaatgaggcgaaccgggggaactgaaacatctaagtaccccgaggaaaagaaatcaaccgagattcccccagtagcggcgagcgaacggggagcagcccagagcctgaatcagtgtgtgtgttagtggaagcgtctggaaaggcgtgcgatacagggtgacagccccgtacacaaaaatgcacatgctgtgagctcgatgagtagggcgggacacgtggtatcctgtctgaatatggggggaccatcctccaaggctaaatactcctgactgaccgatagtgaaccagtaccgtgagggaaaggcgaaaagaaccccggcgaggggagtgaaaaagaacctgaaaccgtgtacgtacaagcagtgggagcacgcttaggcgtgtgactgcgtaccttttgtataatgggtcagcgacttatattctgtagcaaggttaaccgaataggggagccgaagggaaaccgagtcttaactgggcgttaagttgcagggtatagacccgaaacccggtgatctagccatgggcaggttgaaggttgggtaacactaactggaggaccgaaccgactaatgttgaaaaattagcggatgacttgtggctgggggtgaaaggccaatcaaaccgggagatagctggttctccccgaaagctatttaggtagcgcctcgtgaattcatctccgggggtagagcactgtttcggcaagggggtcatcccgacttaccaacccgatgcaaactgcgaataccggagaatgttatcacgggagacacacggcgggtgctaacgtccgtcgtgaagagggaaacaacccagaccgccagctaaggtcccaaagtcatggttaagtgggaaacgatgtgggaaggcccagacagccaggatgttggcttagaagcagccatcatttaaagaaagcgtaatagctcactggtcgagtcggcctgcgcggaagatgtaacggggctaaaccatgcaccgaagctgcggcagcgacactatgtgttgttgggtaggggagcgttctgtaagcctgtgaaggtgtgctgtgaggcatgctggaggtatcagaagtgcgaatgctgacataagtaacgataaagcgggtgaaaagcccgctcgccggaagaccaagggttcctgtccaacgttaatcggggcagggtgagtcgacccctaaggcgaggccgaaaggcgtagtcgatgggaaacaggttaatattcctgtacttggtgttactgcgaaggggggacggagaaggctatgttggccgggcgacggttgtcccggtttaagcgtgtaggctggttttccaggcaaatccggaaaatcaaggctgaggcgtgatgacgaggcactacggtgctgaagcaacaaatgccctgcttccaggaaaagcctctaagcatcaggtaacatcaaatcgtaccccaaaccgacacaggtggtcaggtagagaataccaaggcgcttgagagaactcgggtgaaggaactaggcaaaatggtgccgtaacttcgggagaaggcacgctgatatgtaggtgaagcgacttgctcgtggagctgaaatcagtcgaagataccagctggctgcaactgtttattaaaaacacagcactgtgcaaacacgaaagtggacgtatacggtgtgacgcctgcccggtgccggaaggttaattgatggggttagccgcaaggcgaagctcttgatcgaagccccggtaaacggcggccgtaactataacggtcctaaggtagcgaaattccttgtcgggtaagttccgacctgcacgaatggcgtaatgatggccaggctgtctccacccgagactcagtgaaattgaactcgctgtgaagatgcagtgtacccgcggcaagacggaaagaccccgtgaacctttactatagcttgacactgaacattgagccttgatgtgtaggataggtgggaggctttgaagtgtggacgccagtctgcatggagccgaccttgaaataccaccctttaatgtttgatgttctaacgttgacccgtaatccgggttgcggacagtgtctggtgggtagtttgactggggcggtctcctcctaaagagtaacggaggagcacgaaggttggctaatcctggtcggacatcaggaggttagtgcaatggcataagccagcttgactgcgagcgtgacggcgcgagcaggtgcgaaagcaggtcatagtgatccggtggttctgaatggaagggccatcgctcaacggataaaaggtactccggggataacaggctgataccgcccaagagttcatatcgacggcggtgtttggcacctcgatgtcggctcatcacatcctggggctgaagtaggtcccaagggtatggctgttcgccatttaaagtggtacgcgagctgggtttagaacgtcgtgagacagttcggtccctatctgccgtgggcgctggagaactgaggggggctgctcctagtacgagaggaccggagtggacgcatcactggtgttcgggttgtcatgccaatggcactgcccggtagctaaatgcggaagagataagtgctgaaagcatctaagcacgaaacttgccccgagatgagttctccctgactccttgagagtcctgaaggaacgttgaagacgacgacgttgataggccgggtgtgtaagcgcagcgatgcgttgagctaaccggtactaatgaaccgtgaggcttaaccttacaacgccgaaggtgttttggcggattgagagaagattttcagcctgatacagattaaatcagaacgcagaagcggtctgataaaacagaatttgcctggcggcagtagcgcggtggtcccacctgaccccatgccgaactcagaagtgaaacgccgtagcgccgatggtagtgtggggtctcctcatgcgagagtagggaactgccaggcatcaaataaaacgaaaggctcagtcggaagactgggcctttcgttttatctgttgtttgtcggtgaacgctctcctgagtaggacaaatccgccgggagcggatttgaacgttgcgaagcaacggcccggagggtggcgggcaggacgcccgccataaactgccaggcatcaaattaagcagaaggccatcctgacggatggcctttttgcattggcgcagaaaaaaatgccggatgcgacgctggcgcgtcttatccagcctactcttgcttatccgttctgcttttgcatccactccaccacaaaatcagccagcccctcaacatcattaatatccagtaatgcgacatcaagattaagcggcacatcactggctacagcaataacatgcctgtctatcactaattcttcaggtcgatgtccggctccatcgcgaaacagcacaatctttgcgatctcttcatgcttaaacccttcgaccagaatcaaatccagctttgaggtatccattcgacttgcgagaaactgtagatccagctcttcttcgtctggtgtttccgtcatcaaggcccatcgttgctggctggcaacgatggtttgtgccgcgccagccttgcgcagctcatagctatctttgcctggcttatcaacatccatatcatggtgcgtatgcttaatcagccctggacggatccctctggcgcataatgccgggatcagttttttcaaaagcgtagtttttccggtaccactccacgcggcaaaggcgagtaacggtatcatcgtttttcctgccatcgggcaagctcctctggcgtattcacgttaacaaatgcatctttatgatcgctgaaatcaaccgcatgaccgccagccagacgcataaataccattacccggcgttctcctgcttgcagatattccagtaataaaggctcaatagcgcggtttaccagagcaatagtcgggtgatcgcgttcaccgtcatggacccacacgacaggcgcatctttgcgctgatgattaagcctggctgctaaatcagggggaatgtaaggcgtatcgcacgggcaaaacaaaaaccactcaccagcttcctgctgcattactgaaagcattcctgccagagggcctgggtaatccgccagtgaatcttcaatcactttcagaccgcttgcctgatagatttcctgatgacgattagcattaaccacgacgtgagagagctgcgtcataagcgcgtcagcgacatgttgccataatggtttgccgtttaattcaagcaatcctttatctacgccgcccattcgtctggctttaccgcctgccagcacaacgcctgttatcgtcgtcatcagattcaccgatatcgcctcttttattgtgggattgaccctgctaacgtgtctgtctcaagagtaaggagcatcactatgaaatgtaaacgtctgaatgaagttattgaactcctccagccagcctggcaaaaagagccagaccttaacctgctgcaatttttgcagaaactggcgaaagagtcaggttttgacggcgaactggcggatttgacggatgacattctgatctatcacctgaaaatgcgtgattccgcgaaagatgcggtgatcccgggtttgcagaaagattatgaagaagacttcaaaacggcgctgttacgcgctcgcggcgtaattaaagagtaaaagcttgtaagcggcgccaccaaaatcatcgtgaaatgatatccttcgtcattcgtaatgttttccggatgatgggatgaataacagcgcttttactttccagacactacacccggataccatcatggacgctctgtttgagcatgggatccgggtggattccggtcttaccccgcttaacagctatgaaaaccgtgtctatcaatttcaggacgaagatcgtcgacgttttgtcgtcaaattttatcgccctgaacgttggacagccgatcaaatcctcgaagaacatcaatttgcgttgcagctggtaaatgatgaagttccggtcgcagcacctgtggcctttaacggtcagactttattgaatcatcagggattttatttcgctgtttttccaagcgtcggtggtcgccagttcgaagctgataatatcgatcagatggaagcggttgggcgttatttagggcgtatgcaccagacggggcgcaaacagctttttatccatcgcccgaccatcggtttgaacgaatatctcattgagccacgcaagctgtttgaggacgctacactgataccttccgggttgaaagcggcattcctgaaagcgacagatgagctgattgccgccgttacagcacactggcgggaagatttcaccgttctgcggctacatggagactgccacgccgggaatattctctggcgcgatggtccaatgtttgttgatctggatgatgcacgtaatggtccagccgttcaggatttgtggatgttgctcaatggcgataaagccgagcagcggatgcaactggaaactattattgaagcttatgaagaatttagcgagttcgacaccgctgaaatcggactgattgaacctttacgcgccatgcgtttggtttattatcttgcctggctaatgcggcgttgggctgatcccgcgttcccgaaaaatttcccgtggttaaccggggaagattactggctgcgacagacggcgacttttatagaacaggcaaaagttctacaagaaccccctttgcaattaacacctatgtattaatcggagagagtagatcatgaaaaagatttggctggcgctggctggtttagttttagcgtttagcgcatcggcggcgcagtatgaagatggtaaacagtacactaccctggaaaaaccggtagctggcgcgccgcaagtgctggagtttttctctttcttctgcccgcactgctatcagtttgaagaagttctgcatatttctgataatgtgaagaaaaaactgccggaaggcgtgaagatgactaaataccacgtcaacttcatgggtggtgacctgggcaaagatctgactcaggcatgggctgtggcgatggcgctgggcgtggaagacaaagtgactgttccgctgtttgaaggcgtacagaaaacccagaccattcgttctgcttctgatatccgcgatgtatttatcaacgcaggtattaaaggtgaagagtacgacgcggcgtggaacagcttcgtggtgaaatctctggtcgctcagcaggaaaaagctgcagctgacgtgcaattgcgtggcgttccggcgatgtttgttaacggtaaatatcagctgaatccgcagggtatggataccagcaatatggatgtttttgttcagcagtatgctgatacagtgaaatatctgtccgagaaaaaataattcaatgtaaattacataaagcccgtgaatattcacgggctttttttattatttaataaatataaatacattctgataatgcatcctgccgctggacattatttcagcataagtggatattcaaagttttgctgttttatcagggaatatttatatgatacgtaagtcagctacaggtgttattgttgcgttagccgtaatctggggtggtggcacatggtacacaggtacgcaaattcagcctggtgtcgaaaaatttattaaagattttaacgatgctaaaaagaaaggtgaacatgcctacgatatgacgttaagttatcaaaattttgacaaaggcttttttaattcccgttttcaaatgcaaatgacattcgataacggtgcacccgatctcaatatcaagccaggccagaaagttgtatttgatgtggatgttgagcacggtccgttgcccatcacaatgttaatgcatggtaatgtcatcccagcactggcagcggcaaaagtgaacttagtgaataatgaactgacacaaccgctatttatcgccgcgaaaaataaatcgcccgtggaagcgacattgcgattcgcgtttggtggctcattctctacgacattagatgttgcccctgcagagtatggaaagttttcttttggtgagggccagtttacttttaatggtgatggtagttcattgtctaacctggatattgaaggcaaagtcgaagatattgttctgcaattatcaccaatgaacaaagtaacggcaaaaagttttaccattgattctctggcgcgattagaagaaaagaaatttccggttggtgaaagcgagtcgaaatttaatcagattaacattatcaatcacggggaagacgttgcccaaatcgatgctttcgttgcaaaaaccaggctggatcgcgttaaagacaaagattatatcaatgtcaatctcacctacgaacttgataagttaacaaaagggaatcagcaactcggtagtggtgagtggtcattgattgctgaatctattgatccctcagcagtgcgccaatttatcatccagtataacattgcgatgcagaagcagcttgctgcacaccctgagttagcaaacgatgaagttgctctgcaagaagtgaatgctgcattgttcaaagagtatttaccgttattacaaaaaagtgagccgaccattaaacaaccggtaagatggaagaacgcactcggcgaactaaatgccaatctggatatcagtattgccgacccagccaaatcttcatcatccacaaacaaagatatcaaatcgctcaattttgatgtgaagttaccgcttaatgtcgtcacagaaaccgcaaaacagcttaatttatctgaaggaatggatgcggaaaaagcgcaaaagcaggctgataaacaaatcagcgggatgatgacattaggtcagatgtttcagttaatcacgattgacaacaataccgcctcgctgcagctgcgttatacaccgggtaaagttgtttttaacggacaggagatgagcgaagaagaatttatgtctcgtgccggacgttttgttcattaaaatactcactcgcctctgctcattcagaggcgagtaaaacttacttattctgacgctgtgatgacatgagagacgtcagaagccggtctttttcctgccacaatgagttcagccattgctgaaaatggcgcttaaagcttttgtcattgatgtagtcgccatgtaactcatcggcaataggctgtaaatccacatgtacgacaatccgcgtcagtttaccgcttaacatatcgaagaacggctgacggttattgtccggataacacagcgtaacattaagcagtttatcgaattgtttacccagtacatttagcgccatcgcaatgcctgccgcctttggtggcaacaagttttgaaaagtggagtgggtttgctgatgtttttcttgcgtgaaacgggagccttcaacgaaattgacaatggtggtgggatgcaggcgaaacttttcacaagaacgccgagtggtttcaacatctttaccacgtcgctccggatgacgtaataaataagcgcgggaataacgcttcataaacggcatatccagcgaccagcacgccaggccaagaaatggcacccaggccagctgttgcttgaggaaatatttattcatcggaatgtgcttacgaaacagcacgcacagtacgacaatatctgcccaactacggtggttacaaataagcagataccagttcttcttacttaacccttccagcccgtgaacttcccattgaaggtgtgggttcagatgcagtaataccgccagaccttcacaccagcaatacatcataaaatcacaaaaacgcgaaacctttcgccaaatgactggcacaggtagcaatagttttacaatcccggcaatgatgatcgggacggaacaaaaaatagtgaccaaaatggtcaatacgatactcagcaaaagggttatcgcagcgagtattctcgtcataatgaatttattcaaaaggttagccatagacagtgcgctaaagaagcgcaaggcgcagattttagcagaaaacgacccaaataacggatgatccttaaggagaaaaataattcatatctatccacattagaaaaaatcccattatctcaattattagggatggatttatttttaactgcatgaaaaacaaagacaaacatcatgctgtaaaaagcatgataataaattaaaagcgatgtaaataatttatgcacaaagttatccacatgacgatttgcgagcgatccagaagatctacaaaagattttcacgaaaagcggtgaaaaactcatgttttcatcctgtctgtggcatcctttacccataatctgataaacaggcacggacattatggttcagatcccccaaaatccacttatccttgtagatggttcatcttatctttatcgcgcatatcacgcgtttcccccgctgactaacagcgcaggcgagccgaccggtgcgatgtatggtgtcctcaacatgctgcgcagtctgatcatgcaatataaaccgacgcatgcagcggtggtctttgacgccaagggaaaaacctttcgtgatgaactgtttgaacattacaaatcacatcgcccgccaatgccggacgatctgcgtgcacaaatcgaacccttgcacgcgatggttaaagcgatgggactgccgctgctggcggtttctggcgtagaagcggacgacgttatcggtactctggcgcgcgaagccgaaaaagccgggcgtccggtgctgatcagcactggcgataaagatatggcgcagctggtgacgccaaatattacgcttatcaataccatgacgaataccatcctcggaccggaagaggtggtgaataagtacggcgtgccgccagaactgatcatcgatttcctggcgctgatgggtgactcctctgataacattcctggcgtaccgggcgtcggtgaaaaaaccgcgcaggcattgctgcaaggtcttggcggactggatacgctgtatgccgagccagaaaaaattgctgggttgagcttccgtggcgcgaaaacaatggcagcgaagctcgagcaaaacaaagaagttgcttatctctcataccagctggcgacgattaaaaccgacgttgaactggagctgacctgtgaacaactggaagtgcagcaaccggcagcggaagagttgttggggctgttcaaaaagtatgagttcaaacgctggactgctgatgtcgaagcgggcaaatggttacaggccaaaggggcaaaaccagccgcgaagccacaggaaaccagtgttgcagacgaagcaccagaagtgacggcaacggtgatttcttatgacaactacgtcaccatccttgatgaagaaacactgaaagcgtggattgcgaagctggaaaaagcgccggtatttgcatttgataccgaaaccgacagccttgataacatctctgctaacctggtcgggctttcttttgctatcgagccaggcgtagcggcatatattccggttgctcatgattatcttgatgcgcccgatcaaatctctcgcgagcgtgcactcgagttgctaaaaccgctgctggaagatgaaaaggcgctgaaggtcgggcaaaacctgaaatacgatcgcggtattctggcgaactacggcattgaactgcgtgggattgcgtttgataccatgctggagtcctacattctcaatagcgttgccgggcgtcacgatatggacagcctcgcggaacgttggttgaagcacaaaaccatcacttttgaagagattgctggtaaaggcaaaaatcaactgacctttaaccagattgccctcgaagaagccggacgttacgccgccgaagatgcagatgtcaccttgcagttgcatctgaaaatgtggccggatctgcaaaaacacaaagggccgttgaacgtcttcgagaatatcgaaatgccgctggtgccggtgctttcacgcattgaacgtaacggtgtgaagatcgatccgaaagtgctgcacaatcattctgaagagctcacccttcgtctggctgagctggaaaagaaagcgcatgaaattgcaggtgaggaatttaacctttcttccaccaagcagttacaaaccattctctttgaaaaacagggcattaaaccgctgaagaaaacgccgggtggcgcgccgtcaacgtcggaagaggtactggaagaactggcgctggactatccgttgccaaaagtgattctggagtatcgtggtctggcgaagctgaaatcgacctacaccgacaagctgccgctgatgatcaacccgaaaaccgggcgtgtgcatacctcttatcaccaggcagtaactgcaacgggacgtttatcgtcaaccgatcctaacctgcaaaacattccggtgcgtaacgaagaaggtcgtcgtatccgccaggcgtttattgcgccagaggattatgtgattgtctcagcggactactcgcagattgaactgcgcattatggcgcatctttcgcgtgacaaaggcttgctgaccgcattcgcggaaggaaaagatatccaccgggcaacggcggcagaagtgtttggtttgccactggaaaccgtcaccagcgagcaacgccgtagcgcgaaagcgatcaactttggtctgatttatggcatgagtgctttcggtctggcgcggcaattgaacattccacgtaaagaagcgcagaagtacatggacctttacttcgaacgctaccctggcgtgctggagtatatggaacgcacccgtgctcaggcgaaagagcagggctacgttgaaacgctggacggacgccgtctgtatctgccggatatcaaatccagcaatggtgctcgtcgtgcagcggctgaacgtgcagccattaacgcgccaatgcagggaaccgccgccgacattatcaaacgggcgatgattgccgttgatgcgtggttacaggctgagcaaccgcgtgtacgtatgatcatgcaggtacacgatgaactggtatttgaagttcataaagatgatgttgatgccgtcgcgaagcagattcatcaactgatggaaaactgtacccgtctggatgtgccgttgctggtggaagtggggagtggcgaaaactgggatcaggcgcactaagattcgcctgaacatgccttttttcgtaagtaagcaacataagctgtcacgttttgtgatggctattagaaattcctatgcaacaactgaaaaaaaattacaaaaagtgctttctgaactgaacaaaaaagagtaaagttagtcgcgtagggtacagaggtaagatgttctatctttcagaccttttacttcacgtaatcggatttggctgaatattttagccgccccagtcagtaatgactggggcgttttttattgggcgaaagaaaagatccgtaatgcctgatgcgctatgtttatcaggccaacggtagaattgtaatctattgaatttacgggccggatacgccacatccggcacaagcattaaggcaagaaaattattcgccgtcctgcgtttcttctacaggctgcatctcgctaaaccaggtatccagtttctgccgcagcttgtccacgccttgtttcttcaacgaagaaaacgtttcaacctgcacatcaccgttaaacgccagtacagcttcacgcaccatattcaattgcgctttacgtgcgccgcttgccagtttgtccgctttggtcagcagcaccagaacggcgatattgctgtctaccgcccactcaatcatctgctgatccaaatctttcagcggatggcgaatatccattagcaccaccagaccttgcaggctctgacgtttttcgaggtattcgccgagcgcacgctgccatttgcgcttcatctcttccgggacttccgcataaccgtacccaggcaagtcaaccagacgcttgccgtcagccacttcaaacaggttgataagctgggtgcgccctggggtttttgaggtacgagccaggcttttctggttagtcagcgtgttcagcgcgctggatttacctgcgttggaacggcctgcaaaagccacttcaattccggtatcggaaggtaggtggcgaatatcaggcgcactcatcacaaaatgcgtctgttgataattcaaattagtcaaagcggtcgtctccgtcagtcaaagctttgtggcgattatacctgaaccataataaaaggcggatttttcggcgtgagcgttgtaagtaaaagccatacgctttgtgagacattgccgatagtctttatgcgaaatagcagagaaaattctgcgatgcatgtcaaataagctatataaatcagtgaattgcttttatataaaactctgaaaatgtgcaaatactgatggcggttgattgtttgtttaaagcaaaggcgtaaagtagcacccatagagcgaggacgctaacaggaacaatgactcaggatgagggtcaggagcgccaggaggcgaagacagaggattgtcaggaagacaaacgtccggagacgtaattaaacggaaatggaatcaacacggattgttccggctaaaggaaaaacagggtgtgttggcggcctgcaaggattgtaagacccgttaagggttatgagtcaggaaaaaaggcgacagagtaatctgtcgccttttttctttgcttgctttctgttagattccgccgcaaatctatactgaataaaacggctaaaagacgaaccattatgaaaccatcatcttcaaactcacgcagcaaaggtcatgcaaaagcgcgtcgaaaaacacgcgaggagctggatcaggaagctcgtgatcgcaagcgtcagaaaaaacgtcgtggtcatgcgccgggcagccgcgcagcgggcggaaacaccacgtcaggcagcaaaggccagaacgcaccaaaagatccacgtattggcagtaaaacccctattccattgggcgtgactgaaaaagtcaccaaacagcacaaaccgaagagtgagaaacctatgctttcaccgcaggcggagttggaattactggaaacggatgagcgtctggatgcgctgctggaacgtctggaagcaggcgaaaccctgagtgccgaagagcaatcctgggtggatgctaaactggatcgtattgatgagttgatgcagaaactcggcctctcttatgacgatgacgaagaagaggaagaagacgagaagcaagaagacatgatgcgtctgctgcggggcaactaacggattgccgccgtgggccttcccgttctgctgataacccttccggttatatgttatctggtgtggttattcgttaaactacagcggttgtcgcggcgacaaaagtggctgcgcaaccggctgatgacccgaaacgggcatccgccggtacgccgtagccgccagagacgccatcggaaggagtgagcatgtctgtacagcaaatcgactgggatctggccctgatccagaaatataactattccgggccacgatacacctcgtacccgaccgcgctggagttttcagaagacttcggcgaacaggcgtttttacaagccgtggcgcgctatcctgagcgtccattatctctctacgtacatatcccgttctgccataagctttgttacttctgcggttgcaataagattgttactcgccagcagcacaaggccgatcagtatctggacgcgctggagcaagaaatcgtccatcgtgcaccgctgttcgccgggcgtcacgtcagccaattgcactggggcggcggaacgccgacgtatctgaataaagcgcaaatcagccgcctgatgaagctgctgcgcgaaaacttccagttcaatgccgatgcggagatttcgatcgaagtcgatccgcgggaaatcgaactggatgtactcgatcatttacgcgccgaaggctttaatcgcctgagcatgggcgtgcaggacttcaacaaagaagtgcaacgtctggttaaccgcgagcaggatgaagagttcatctttgcactgcttaaccatgcgcgtgagattggttttacctccaccaacatcgacctgatttacggcctgccgaaacagacgccggagagtttcgcctttaccctgaaacgtgtggcggagctgaaccccgatcgtctgagtgtctttaactacgcgcatctgccgaccatttttgctgctcagcgcaaaatcaaagatgctgacctgccgagtccgcagcaaaaactcgatatcctgcaggaaaccatcgccttcctgacgcaatcgggctatcagtttatcggtatggatcactttgcccgtccggatgacgagctggcggtggcccagcgtgaaggcgtgctgcatcgtaacttccagggctacaccactcagggcgataccgatctgctggggatgggcgtttccgccatcagcatgattggcgactgctacgcgcagaaccagaaagagttgaagcagtactatcagcaagtggatgaacaaggcaatgcgctgtggcgtggtattgcgctaacgcgtgatgactgtattcgccgcgatgtgattaagtcgctcatctgcaacttccgtctggattacgcccctattgagaaacagtgggatttgcacttcgctgattactttgcggaagatctcaagctgctcgccccgttagcaaaagatgggctggtggatgtggatgagaagggaatacaggtgacggcgaaaggtcgcttgctgatccgcaacatttgcatgtgctttgatacctatctgcgccagaaagcgcggatgcagcagttctctcgggtgatttaaatagtgaatggcgcttcgtttacaaagtagaaaacgaaagcgccatcaatgtgctgagaacaagattgcctgatgcgctgggcaacaaaacctgttgaaattattgcttttgtaggccggataaggcgtttacgccgcatcaggcatctgagcatgatgcctgatgcggcgctggtcgcgtcttatcaggcctacgactttctccgcatccggcataaacaacgagcttcagctaaacagcccaatcattgcggcacacagcacggcagcaacggcagtttgcggtgtgtggctgtcaactgcgccactcgataccagattaattattgattccagcataatgactctccccgttttccgggcaagatcatactgaacttatcggaacagtaaagcgtaaaataccagcaatttgcgctcaataatcaatctttacacacaagctgtgaatcactccatccccagctcttttaacttacgcgtcagggtgttgcggccccagccgagtagccgcgccgcttcctgtttatgcccctgcgtatgtcgcaacgcggtcgtcagtaacgtccgctccagctctggctgcgcttcggaaagcagattttgatgaccggaacgcagcgctctgtctgcccactgcgcaagaagcgtcgcccagctgtccggttgcatttgcgaagtactctccgcaaccgttgattcaaacagttcgccgggcaaatcctgaatcaacacttcctgcccggcggccatcaccgttagccagcggcaggtgttttccagctggcgcacgttgcctggccacgccagacgcgtcagagcagcttcggtttccggatgcagtaacttcgcttctacgcccagttcgcgcgcggcaacctgtaaaaaatggcgcgccagacggggaatatcttcccgacgttcgcgcagcggcggcagatgaacgcggataacgttcaggcggtggaacagatcctcacggaacttaccttcctgcactcgctgttcgagattctggtgagtggcagcgataatccgcacatccactttcaccggcgcatagccgccaacgcggtaaaactgaccgtctgccagcacgcgcagcaaacgcgtctgcacatccagcggcatatcaccaatttcgtcgaggaataatgtaccgccatcggcctgttcaaaacgcccctgacgaatggtattcgcgccagtaaacgcgcctttctcgtggccaaacagttctgattcgatcaaatcttttgggatagctgccatattcagcgcgataaacggcgctttggcgcgcggactgtggcgatgcagggcatgagcgaccagttctttaccggtgccggattcgccgttaatcagcacgctaatagaagaacgcgaaagccgaccgataatacggaacacgtcctgcatggctggcgcttcgccgatgatatcggtcgttgggccgttaagctgaacattacgcggctgctgctgttcctggtaatgactgatagcgcgctcaaccagcgccactgcttcgtcgatatcaaacggtttgggcagataatcaaacgccccttgttgataggcgctgacggcagcatccagatcggaatgtgcggtcataatgatgaccggaagcattggatggcgctgtttaatctgcttgagcagcgccagcccgtccattcccggcatacggatatctgaaagcagcacatccggcgttttgctcgccagcgcctccagcacttctgcgccgttctcaaacgtcgtacaggttaaacctgccccagcgagcgcacgttcaagcacccaacggatggaactatcgtcatcgactacccagactatccctcgttgcataaacgtcacctttatttcctgataggcaggtaaaccgagaactcggtatgccctggccaactggtaaattcaattttgcctgaatgctgatcaatcaaattacgagcgatggataagccaagcccggtgccaccttcgcggccgctgaccatcgggtaaaacagcgtatcctgcaaatgaggcggaatgcccggcccgttatcttccacatcaatccgcgccgccagccggtagcgctcgccgtgtaaggtcagttgaaacgcggtgcgggtacgcagaatgatttcaccgccttccggccccagcgcctgtagcgcattgcgcacaatattcagcaagacctgttcaatttgatccgggtcgtgcgccagttccggtaggctgggatcgtaatcacgaatcaaccgcacgttgtccggcagttccatcgacaccagcgttaccacgcgttcagccactttgtgaatactttcggtaacgcgcgtaccgggcagctgcggccccaacagacggtcgaccagatttcgcagccggtccgcctgttcgataatcactttggtatattcgagtagtgatgggtcaggtaacgctttgctgagcagctgcgccgcgccacgtaaaccgccaagcggatttttaatctcatgtgccaggccgcgcactaaatcacgggcagcaacctgctgggcgtgctgtagctgttcctgacttaagcggcgctggttatccatcggagccatctccagcaggatcatgccgtccggcatacgctgggccgtcacagaaaggatatgcgagcgcccgtcgatgaccagcgtcacttcgttatcggtaaaaccttgccccgcctccagactttcttgcatcagctcgatatttaatgagaagtagctcaacagttccggtaacggtgtaccaaacaatttgcgggagctttgggcgagcagttgttgcgcggcagggttggcgtaatggatcgccaggttgtcatcgattaacaaaatactgttaatcagcgagttgaggatctgcccagcatcgggctgcgtgcctgttgccataaagcagtctcctgaacaggttgcaccattttagtgcattatagctttttacggataaaaagcgcgaagcatcagagaattgacggagaaaaaagcccatgcagagatgggctacagatagctgacaaacttcacgttggagagcgactcacctgctccggcctaccacatcatcaccgtgtaggccggataagacgcatttgcgtcgcatccggcgtgatgtgcttgccaccgatcccaggcctgccagagacaggcgaaaagtttccacggcaactaaaacacttagacgctgtagtacagctcaaactctaccggatgcggagtcatacgcacgcggtcatcttcttcgcgacgcagagcgatgtacgcatcaattgcttcgtcagtgaacacgccaccggctttcaggaactcgcggtccagatccagttcgttcagtgcttcttccagagagcctgcaacctgtgggatctctttcgcttcttctggcggcaggtcatacaggtttttgtccatggcttcgcccggatggatcttgttcttgataccatcaagaccggccatcagcagggcagcaaagcacaggtacgggttagctgccggatccgggaaacgtacttcgatacgacgtgctttcggagaagaaaccaccggaatacggatagacgcagaacggttacgcgcagagtaagccagcattaccggtgcttcatagcccgggaccagacgcttataagagttggtggtcgggtttgccagggcgttaatcgctttagcgtgtttgattacgccgccaatgtagtacagcgcctgctcagacagacctgcgtatttgtcgcctgcgaacaggttaacgccgtttttagacagagacatgtggcagtgcataccggagccgttatcaccgaacatcggttttggcataaaggtcgcggttttaccgaagcggtgcgctacgttgtgcacaacatatttgtagatctgaatttcgtcagcttttttggtcatggtattgaagcgggtagccacttcgttctgaccagcagtcgctacttcgtggtgatgggcttcaaccaccagacccatctgttccatcaccagacacatttcagaacgaatatcctgagccgagtctaccggtggaaccgggaagtaaccgcctttcactgccggacggtgacctttgttaccaccttcgtattgggtggaggagttccatgcgccttcgatatcgtcgatagcaacgtgggaaccggagatagatgatccgaaacggatgtcatcgaacaggaagaattcaggttctggcccgaacagtacggtgtcggcaatgccagtggaacgcaggtaatcttcggcgcgcttcgcaatggagcgcgggtcacggtcatagccttgcagggtgccaggttcaaggatgtcgcaacggataatcagggtggagtcggcgaagaacgggtcaatcactgcggtggatgcgtctggcatcagcaccatgtcggactcgttaatgcctttccagccgccaatcgaggagccgtcaaacattttgccttcttcgaagaattcagcattcacctgatgagcagggatagtgacgtgctgttctttacctttagtatcggtgaagcgcaaatcaacaaacttcacttcgtgctcgttcagcatcgtcagtacgtgttcagcggacatactttaactctcctggattggtcatggtcgtcgtggtaacgaaatctgcaattattttggccgtgtcgccgtaaaaaagataaagcgaaatctgtgccaacttttaaattgcccctaaaaggcgttatcatgcgcaccatcgtgcaaaagggctgcaccacgatgtgaatgttgcaccaatatagtgcttcaatggaaacattaagcaccatgttggtgcaatgacctttggataaccctttttatgctccgtgaaagcgatcacaaagggactctgcaatacttgtttgcggaggatgtttgtgatcctgttttgtagtgcgattaatccgtgtacaataacgcgctatttctaatgcctgaggcaaagttgtgatcgaaaaattgcgtaatatcgccatcatcgcgcacgtagaccatggtaaaaccaccctggtagacaagctgctccaacaatccggtacgttcgactctcgtgccgaaacccaagagcgcgtgatggactccaacgatttggagaaagagcgtgggattaccatcctcgcgaaaaacaccgctatcaaatggaatgattaccgtatcaacatcgttgataccccggggcacgccgacttcggtggtgaagttgaacgtgtaatgtccatggtagactcagtgctgctggtggttgacgcatttgacggcccgatgccgcaaacgcgcttcgtaaccaaaaaagcgtttgcttacggcctgaagccgattgttgttatcaacaaagttgaccgccctggcgcgcgtcctgattgggttgtggatcaggtattcgatctgttcgttaacctcgacgcgaccgacgagcagctggacttcccgatcgtttacgcttctgcgctgaacggtatcgcgggtctggaccacgaagatatggcggaagacatgaccccgctgtaccaggcgattgttgaccacgttcctgcgccggacgttgaccttgacggtccgttccagatgcagatttctcagctcgattacaacagctatgttggcgttatcggcattggccgcatcaagcgcggtaaagtgaagccgaaccagcaggtcactatcatcgatagcgaaggcaaaacccgcaacgcgaaagtcggtaaagtgctgggccacctcggtctggaacgtatcgaaaccgatctggcggaagctggcgatatcgttgcgatcacgggccttggcgaactgaacatttctgacaccgtttgcgacacgcaaaacgttgaagcgctgccggcactctccgttgatgagccgaccgtttctatgttcttctgcgttaacacctcgccgttctgcggtaaagaaggtaagttcgtaacgtctcgtcagatcctggatcgtctgaacaaagaactggtacacaacgttgcgctgcgcgtagaagaaaccgaagacgccgatgcgttccgcgtttctggtcgtggcgaactgcacctgtctgttctgatcgaaaacatgcgtcgtgaaggtttcgaactggcggtatcccgtccgaaagttatcttccgtgaaatcgacggtcgtaaacaagagccgtatgaaaacgtgactctggacgttgaagaacagcatcagggttctgtaatgcaggcgctgggcgaacgtaaaggcgacctgaaaaacatgaatccagacggtaaaggccgcgtacgtctcgactacgtgatcccaagccgtggtctgattggcttccgttctgagttcatgaccatgacttccggtactggtctgctgtactccaccttcagccactacgacgacgtacgtccgggtgaagtgggtcagcgtcagaacggcgtactgatctctaacggtcagggtaaagcggtcgcgttcgcgctgttcggtctgcaggatcgcggtaagctgttcctcggtcacggtgcagaagtttacgaaggtcagattatcggtattcatagccgctctaacgacctgactgtaaactgcctgaccggtaagaaactgaccaacatgcgtgcttccggtactgacgaagccgttgttctggttccgcctatccgcatgactctggaacaagctctggagttcatcgatgatgacgaactggtagaagtgactccgacctctatccgtattcgtaaacgtcacctgacggaaaacgatcgtcgccgcgccaaccgcgcaccgaaagacgattaatttcgttttttagtcataaaaaacctgccagcgatggcaggtttttttttgcctgtcgtgagcgcacaccaatgcgagtatctcccttataagtctgtggttacgtcaatagagagctttgtcacaattatctgcaaagtcatacgccgttaattgctttcttttttggcgtaagcgtaagatgcttcatctggtttaaaccaaaaggattaaacaatggcggagaatcaatccaccgtagaaaatgcaaaagagaaactggatcggtggttgaaagatggcatcaccacgccgggtggaaaactcccttcagaaagagagctgggagaactgctgggcattaaacgtatgacgctgcgccaggcgttgttgaacctcgaggcagaatccaaaatcttccgtaaggatcgtaaggggtggttcgtgacccagccgcgatttaattacagtccggagctgtcggcgagctttcagcgggccgcaattgagcaagggcgagagccttcctgggggtttaccgagaaaaaccgtaccagcgatattcccgagacgctcgcgccactgattgcagtgacgccatcaactgaactctatcgcatcaccggctggggggcgctggaaggacataaagttttctatcacgaaacatatattaatcctgaagttgctccgggctttattgaacaacttgaaaaccactcattttctgcagtctgggaaaagtgctaccaaaaagagacggtagtaaaaaaattgattttcaaacccgtcagaatgccgggcgatatcagcaagtatcttggcggttctgcgggtatgccagcgatcttaattgaaaagcatcgcgccgaccagcaaggcaatattgtccaaatagatattgaatattggcgatttgaggccgtagacctcatcattaatctgtaggtgttttatggtgacaataaataacgcaagaaagattctacaacgtgtcgacactcttcctctttatttacatgcttatgcctttcatttaaatatgcggctggaaagagtgttgcctgctgatttacttgatatcgcaagtgaaaataatctacgtggcgtcaaaatccatgttctcgatggcgagcgtttttctcttggtaatatggacgataaagaactctctgcctttggggataaagcccgccgtctgaaccttgatattcatattgaaaccagcgcctcagataaggcatctattgacgaagccgtcgccatcgcgttgaaaactggggcatcgtccgtacgtttttatccacgttatgaaggtaatttgcgcgacgtattatcgattatcgctaacgacattgcctatgtacgggaaacgtatcaggacagcggcctgacttttacgatcgagcagcatgaagatttaaaaagtcatgagctggtgtcgctggtcaaagaaagtgagatggaatctctttccttactgtttgattttgcgaacatgatcaatgcaaatgagcatcccatcgacgctttaaaaacgatggcaccgcatattacccaggtccatatcaaagatgccttgatcgttaaagaaccgggtggcctgggtcataaagcctgtatttcaggtcagggtgatatgccgttcaaagcgttattaacgcaccttatctgcctgggtgatgatgagccgcaggtgacggcatatggcctggaagaagaggttgattactatgcgccggcgttccgctttgaagacgaagatgataatccgtggatcccttatcgccagatgagtgaaacaccattgccagaaaatcatttactggatgcgcggttacgtaaagaaaaagaagatgcaattaatcagataaatcatgtgcgtaacgtactacaacaaatcaaacaagaggcaaaccatcttctgaaccactaataagttttaactcatacgcagttaataaaaccattccatatgaatggtcggtatcttattgcctttaaaacagtgattttaaaaatcgcttaggggatgttatgctcacgaaaaagaaatgggcgttatttagtctattaacactgtgtggcggtacaatttataaattaccgtcgctgaaagatgcgttttatatcccgatgcaggaatatttccatttgaccaatggtcaaattggtaatgctatgtcggtaaactcatttgtcaccacagtgggcttttttctgtctatttattttgccgataaactaccgcgcagatacaccatgtcattctcactcattgcgacaggattactgggtgtttatttgacgacaatgccggggtattggggcatcctctttgtctgggcgctatttggcgttacttgcgacatgatgaactggccggtcttgctcaagtcggtaagtcgattgggcaatagcgaacaacaaggtcggttgtttggcttcttcgaaacagggcgtggcattgtcgataccgtggtggcattttctgcgttggcagtatttacctggtttggcagtggcttattaggttttaaagcaggcatctggttctattcccttattgtgattgccgtaggcattattattttctttgtcctgaatgacaaagaagaggcaccgtccgttgaggtgaaaaaagaagacggagcatcgaaaaacaccagtatgacctcggtgctgaaagacaaaactatctggcttatcgcttttaacgtcttcttcgtttacgcggtttactgtggcctgacattcttcattccattcctgaaaaacatctatctattgcccgttgcgctggtgggggcttacggcatcattaaccaatactgtctgaaaatgattggtggaccgattggtggcatgatttcagataagatcctgaaatcgccaagtaaatatctatgctacacctttatcattagtaccgctgcgctcgtactgttgattatgctgccgcacgaaagtatgccggtctatttagggatggcatgtacgctgggctttggcgcgatagtctttacacagcgagccgtattttttgcacctatcggcgaagcaaaaattgctgaaaataaaacaggtgcggcgatggcgttgggtagctttattggttacgctccggcgatgttctgcttcagtctgtatggctacattctggatttaaatccggggattattggctacaaaatcgtgtttggcattatggcctgcttcgcattcagtggtgcggtggtttccgtaatgctggttaagcgtattagccaacgtaagaaagagatgctggcggctgaagcttaattaatggccggatgtgcttaatccggccaacgaaaaccgtatcaaccgtaggccggataaggcgtttacgccgcatccggcagtttcacatcagaagaaatacttcgtcccgatacggatctggttttgctcgcggtggtacggttcgacgttgcggtctaaccagcgcaattcgaaataagggagccagtgttcattaatacggtaacggaaggtgttagtgatttcccaatgatgatctttcccgttgctactattaaagtcattcactcgcatgaagtaatgtggctcaaatgtataggaaaatttatcggtgattttaaaattccagtaggtgccaatttcataggtgtcattattatccagttccccgctcaaatctgttgaactatagttattatggttatagcgatttcgtactgtcagattaaaccatggtacaaatttatagttgacgtccagatacactgcaccacccgaaccgatactcttatcattaattaagccaccgggctggatggttaatttatcggttggtttaaataacggataccagccttcaatttcgttatatccatgttttagttcatcttctcgctgaaagttgtaggtattggttaacataatacccgcgcccatatcgaagttataacccacacgtagcataacctcgccctgatcggaggcaagattatatgcctccctgttttcgacgtatgcgccagcaaataccgaggcagaggtcagagaagataataaaattattgcattaatctttttcataataagtccattttttaaacgtagggaggccgccacccaccaggatggaaatagcggctattgacatttataacgttacggaagccgttttttcttctgtcgccatctctttatttttgcgttggttgatttcctcaataatcaatgcaaaccgtttttcattgagtgtgtaaaagaatcccatcgtcaatgcagcaataattgccagtgcacaaggccagataaaaatgagctgacgcaaaccctgtaatgtcgcatcgctttgcgcgatgttgggaacataaccaatttgcgtcagcataatgcctggcaagaagccagcaagtgcggcagaaattttacgaaagaaggtataaccggtataaacagaaccttcggcacgaataccggttttccattcaccgtaatctacggtatctggtaccagtgcccagttcaggctgtttacaaaggccgtgccaaaaaaggcgacacaagagaacatgacgaaagtgaaagagttacttccccagaaataattcagtatatcacccaccgcccacagcaccatgccagccagataaacctgttttttaccaaaacattttacagttaatggcaccagtaatacgccgatgaggatgcatcccatactgaagaatcccatccacgacaataaattaatatcattcagcacatactgggtgtaatagacctgaatcgccagtttgatattaaatgccgccagggtacacaagttagcaatgcataaaaccagcaatggcggattccgaaatatcgcgcaaaatgatttgagaatactggctttatgtccggttggcgttgtgtccacataatgctctttgacgcctctgtagcacagcatcataaaaataaagccgccaatggagaacataagtgccgcacaggcataaccgacggttgagtcagaaaaaagcgactgcaacggaataaacgccacggtacaaatcaatagccctatggttgcaccaccctggcggtaagccgcgagctgcgcgcgctcattcgggtttttggtaattgccgggatcatcgcaccatacgagcagttcatcagactgtatgaaagtccaaacatcataaacagcgcggtggcaatcgtcgttttaaccggcaaacaaaaggtggtggcgataaactggagcgttgcaattaacgccgccggaaccgctgcatataaaataaagggacgaaatttgcctttaggcccaatatttttccgcgagtcgagtaaaaatccggtgagcatatcggtaaacgcggtaaaaaacttcgccaccagaaagataatcccgccatagtaagcaggcatccctaattcatcggtataaaatttgaggagatacagagtaccgatgcagagcattaaattcgaaccgacgtcgcccataccataggcgattttttcccgcagattcagttttaatgtcagtggattatggtcagacataatcactccttataacgccccgcagggcgtcgtttattattattacgccgtgcgtttacgggcttctatctcttccacaatgcggacatacatcttctcgttcaggctgtagaagcaacccatcgccacaatggtgactaccgccagtgcgcttgggtagatgaagatcaactggcgtaacccttcaatggtgtggtcagcctgtgcgacgttcggcacatagccaatttgcgtcagcatccagccggggaagaaaccagccagcgcctgagacactttgcgaaagaaggtaaaaccggtgtagaccgttccttccgaacgcacgccggtgcgccactcgccgtactcgacggtgtcggaaaccagcgcccagttcaggctgttaacaaacgctgagccaaagaacgccaggcaggagaacgccacgaagctgaccgaaccgccgccgaagaaatagttgagcagatcgcccagcacccaaatcagcaggccgccgatataaactttcttcttgccaaaacgtctgactgaggcaggcatcaggaatacgccgatgaaaatacagcccatgctgaaaaatcccatatacgacaacaggatgggatcgttaagcacgtactgggtgtaatagacctggatggcgagcttgacgttaaacgcccctaaagtgcagaggttggcaatgcacagaatgaacagcgggcggttacccgcaattgcgcggaaagattgcagcaggcccggcttttgcgccggattagcaggctgggtttcgacataacgctctttcacgcccgagtagcagatccacataaacagcaggccaaacagtgaaaacagcgtggcggcgaagatatagccaagttgctgattaccttcgataagattcataactggcacgaatcccaccgtgcacagcagcaggcccagcgtagcgccgccctgacgccatgccgccagtgaggcgcgttcgttggggtttttggtgatagcgggaaccattgcgccgtaggagcagttcatcatgctgaaaaacagtccgtaaagcataaacagaatagtggccatcaccgttttaccggtgacatcaaacggtgtgccgacaaagttggcgatcgccagtaaggtgaccgggaatgacgcatacagaataaaaggacggaacttaccttttggaccgatcttgcgtcgggaatccaacataatgccggtacccatatcggtaaacgcagtaaagaattttgaaatcaaaaagataatgccgccataggtgcctggcagccccagaacgtcggtataaaacttcaaaagataaagcgtaccgatatccagcaggatgttagaggccaggtcgccaataccgtaagagagtttctctttaaagggcaggcgtaaagttgctggatcttccgttgtgatgtgactcatcgatgttctccctttgcccatgagtttccccacgggcggatgtgattagatgctttttaacgacgcgaacagtgccgcccattcgctatcggcgcgataaaagaccggcggcttgccgatgggcgcattaacggtaacttccccgccccggaacgcttcacccgtccaggcgtggacccagttatcctccggcagatagagcgtccagtcgctacggccttcttcatgcaccggagcgaccagaatgtcgcgacctaacaggtactgatatttcagggtgtaagtgtgcgcatcgtcttcgtaatgcaggaacagcgggcgcataaccggcaggccggacttcgcattcagcgcgacggcctctttcaggtaaggtttcagggtggtgaagacggtggtcatacgggcgaaatgggcgatggtttctgcgtcgccgtcaaactgccagttgtcgccaggacggttaccttcgtgggtgcgcatcatcggcgtgaaggcgctgaaatcgcaccagcgcagcagcagctctttgctgcgcttcatctcaaacagggtggtgtaaccgccaatgtcgctgtggtgcaggccatgtccggtcattgccagcgacagcgccgccgggacaaccgacgccaggccatcgtcgagactccagtcgacgttctggtcgcccgcccacatcatggtggagtatttctggctaccggtagaaccggcgcgcataaagaaaaggatctcgccgagcttgcccgtttcttcaagggcttcgtagttacacttcgcccacagcgcaggccaggcgttatgcataatttcggcactgacgccgttatgcaagtacgtgtcggtgggcagatactcgccgaagtcagccatccagccgccgcagccgagttcaatcatgttctttttgatcacttccttgaaccaggcgtaggcttctggattagtgagatcgacaacgccgccgtaaaactcgccaaactccaccagatagtcaccgccagaggcatcttttgccagatagccgtgttgtgccgcttcttcgcagagatctttatcgctggcaacatacgggttgatataggccaggaactgcacgccctcctgattccactgcttaatgcgtgaatccagttgcgggtagttttcgctgttccacttccagttccacatcacgcgtttgccaaaagaggtcatacgaataccggaccagtcctgcgcccagatgccgttgaccttcacgcccgcgttacgcatggtgtccagtttcttctggcacacttccgtcccgccctgaatgccgagcgttactccgtcataaatccagtcgggcagttctggctggcgtcccagcagggcggttaatttttccagcagggaaatgtatgtgtcagcacattcaaaacgcagcgttgctttgtcttcccacagcgccagttcatggtattccggggcactaaagtcgaagttcatatagcaactgttatcaacatggcagtaatacttctgcgtgctgacaaacgtaggctgtgggaagaaagtccagtaatagtcgccgcccgcattttctttgcagtcggcctgccaggtgacataggtttgtttgttgcgaccaacgccttgttcactggtccatagcgggaacggtttgccacgcagatcgaagtaggaaaactgttcgccgcagccgtagatatggtcctctggttgagcggcaaggcgcagccagatacggttgtggttaaggttgtcgttttgtagttccagcaataaacgcccctgatcgtcggcagagatattcagcgtggcgctaatgtcagaaccacggctgaaatgaattaaccaaccatccggtgactggctgacgatggcgtcggtaagcgcaattttctcctgtagtttatctttaatgctgaaattaccgcggaacatatcgatatccgctatacctgagccaatccataaacaaggattatctttgctatgggttaaaataagacgttgttgaaaatgtagggtaaaactgtcgttattctgatgaaattgaaaatctaataactgtggacgtggcgtatccataactaatctccatagagttgagaacgagattgttgccttcctgttattacaggcttatgtaaaatgattctcataaaactgatatataaaaactttacagaagctgagctgtttttaacttaataaattgaagatacataatgttgcctttagcgagtgaaatgttcttcaatgattttgactgctaatcaatacaagttattttctctgtccgtaaatattaaaaaacaggcggtgcggttttcctgattccagtaataataagtcgatacctgaattaaaggcgttaggcgggcaactcataggttcaactgccagtccctgacgctgtaatttttcaccgctataaacctgcacccagagttgatcggaacaaaggcttaccgaaagcgcctgctgtggatgggtaatggtcatttcccacaaatcattagcggttttaaaggtgtggtcgatttttgtcgcggctatttttttcgcctgcgtgaaatttaaatccagctcatcaacgtggtgaagcgttgtcggattcgcgtgctcatcgacggcataaacctggtttgccggaagctggaacagatattcatcaacagatgttaagttgcaggttaaataaggatgaatacccacgccataaggcgctgcgacagtgccgatattctggcttgcgatctcaacggaaagacccgtgtgtgcgttgagcgaataaacaacttgtgaagccagcataaacggatagccgtaactgggcggcagaaaagctgtcagggtaacgctggtggcggttaattcactaatttgccagtctcgccaggcaagcagcccgtgaatagcggcttttgaactatgttcattaatgggtaactgatattcctgcccctgatagcggtaacagccgttggcgatccggttcggccacggaataagcactttacccagatgcgccagcggcatctcttcgggtttgtgcgggatgactaaatgacaaccctgaaaggttaattcagccagaccagcaccgacggtcacaatggtcgcgtgataatcccccgcggcaagtgaaacggtctgtccactgcaatgcatattggtgatttgcatacaaggcaccttaattaacgacatacagcctcccgtgaggctgatgtcaaacccaaaaactgcaccggacggtcccctcgcccctttggggagagggttagggagaggggaaaacccgcaccctattttcagatcagttatttcgcattaatatccagcagacccgctgcaaccgctggagccatgccgggcgctaacgggatacgcgggatcaccaggcaatgcagcaggtgataaatatcctgtttgccgtcccagactttggtggtgaccttattgtccgcatccagctcctgccaccaggaaccattttcatagtccatcaggtacttaatgcagtactcccaccatgtttgataccaggtttcatactggcgatcgccagtgacggtgtagagcgcgtaggccgtacccattgcttcgacgataggccaacgtacacgttcgcggaccaccggttttccttcccagtcaacggtataaacaatcccgtccgcgccatcgggtgcccaggcatcgcgcacggtggcgttaaacagacctttggcatcttctagcagccatgctggtggttgttcgcaacgggcttccagggcagcatggatgtgcagcattaaacggccccattcgatccagtggcctggtgtacctccgaacgcgcggaagcgatgcgccgggttatctttgttgtaatccggcagcggattccactgggtatcgaagtgttcgttaacgcgataatgattatttctggcgacgtcgtggataatcacggaagccacgcgaatcgcgcgatccagccattttttgtcgtgagtgacgtcataaacaatcaagaaagcttccaccgcgtgcatattggcattgccgccgcggtactcttcggttttgctgaaggcttcgtcccaggattccaggcacatctgctcttcttcgctccagaaatatttctcgataatttcaatggtgtaatcgagcagcttgcgcgcttccgggtgacccgttgtgacggcgctggcggcacccagcagagcaaagaagtgttgatagccctgtttggaggcatccaccacgccctcgtcattcacgcaggcataccagccgccatattttttatcacgcagtgcgccgttcatggctttgataccgtgatcaaccaacgagtaagcgccaggtcgacccatcgccgcagcaacggaataaacgtgcaacatacgagcggtgatccacagatgggtgcccatctcttctttgatttgccctttattgcctaaccagccaaaaccagtcggcactacggaatttttaccaaaatcaaagatgcggtcggtttcctgttccagccaacggttgtggcttagggtgttaaaccatttcattccttttatcctcatcttagcggcgtttagccatcatttcgtcgacgatatcgccaagttgttgtaatttcggtgcgcaaacgtcacgcagcatcagctcgttgtctggtaaaccgacgaccgatgcccagactgcacggcctgccaggaatcccgatgcgcccgccgtcattgccacgcgtacggcacgcgggaacagtttttcgtcgacaccggaagagaggatcacccatggcatattgatatggtcattcagacgttgtgaagcacagagaagctcttgttgcggacctttgccataaagcggcatttcaactttgtagaggtcagcgccactgtcgcccagctctttggcggcatcgatgatcgcttgttcgcgatcgaatttatcgccacgacgcggtgggcggacgactggctcaatgatgcttaccagaccgtgtgagtggcacagttcgttgaactctttcaccatatccagacgttgctgcgcatcttcatcactacgccacagcaccagcagttttaaggctttgccaccgtcttgtttgatctgtagcggattgattttgcggtcaataaccacgctatcgaccggaataccgttgccaggaatgaactcatcggcggcgacaatcatggcgcaacttttggcaatcgcgttttgctcaaccacctggcggtagcagaattgttgatctaccagaatcgccgaggcataaggcgagagggcctttgcagcgttaactttgaaatcagttaaaacgctatcggctaccggagcgggtgccccagccgcggcaaacatcatgcgcatggcttcgcgctgatcgaccgccagcatggcaaaaccgcccgatgcgcgcgtaatgtcgttgatggtgtacttattcattcatttattcctttatccagtcgttacatttttactttggcagtcatcccggcactgacacggacctgttccagaatggcggaccagtcctggcgaccgcgacccgctgcgcgcgcctggctataaacctcccgtgaggcggcccccagcggcattggcacatgcagctggttggcgacatcaagggcgatgccaagatccttatgggcaagatcgatcatgaaggcgggagaaagatctccgctgaggactttgtttggccaggaagtggtgaagtgacctttaccggcggcggtaccgctcatcactttgacggcaacatcgaagggaagattcagggcttcgcacaaaacggcggcttctgccgaaagcgcattgagcgcgatgctcatgtagttgttgatgagcttaacgcggatccccatgcccggaccgccagcgttgatcaactcactgcccatcgccatcaggatcggtgtggcacgttcaacttgttcagcggtgccgccagccagcagtaacagagtaccggtaatggcatttgcagaagtacggcctaccggaacatccatcatgctgaagcctttggcttgcatatcggcaatcaatttatcggtttgcagcggatggatggtggacatatcaatgaccagcgcatcggtagataagccttcgcaaacgccgttttcaccgaacaacacgttgcgcaccagatcgccattcggcaacatggtaatgataaattcggcatctttagcggcctgcgccgggttggcggcgggagtcgcacctttgtctaccagatgccgcacagcttcggcgttcacatcaaagacgcgaagttgatgcccttgctgcaataaattgctcgccattggcgaacccatttgtcctaaaccgataaacgcgattgctgccataaccctctcctgaatacagttatgtcactttttgtcatttatgacatgctttgcttgtctgtttttgatcgtatttgtaatttatcgtcaaaaaattgacagccgtcactttttaaacaattggtgaaattaaaatgaacgcatcccaaaatgtttaaggaatgaccatgattcgtgttgcttgtgtaggtataaccgtgatggatcgcatctattacgtggaagggttaccgacggagagcggtaaatacgtggcgagaaattatacggaagttggtggcgggccagcggcgacggcagcggttgcggcggcaaggctgggggcgcaggtcgattttattggtcgcgtaggtgatgacgacacgggcaacagcctgctggcagagctggaatcctggggcgttaacacccgttacaccaaacggtataaccaggcgaaatcttcgcaatccgccatcatggtggataccaaaggcgagcggataatcattaactaccccagcccggatctgctgcctgacgcagagtggttggaggaaattgatttctctcagtgggatgttgtgctggcagatgtacgctggcacgacggcgctaaaaaagccttcaccctggcccgtcaggcgggtgtgatgaccgttctggacggggacattacgccgcaggatatcagtgagctggtggcattaagcgatcacgcggccttttcagaaccgggtctggcgcgcttaacgggcgtgaaagagatggccagtgcgctaaaacaggcacaaacgctcacaaatggtcatgtctatgtgacccagggtagcgcaggctgcgactggctggaaaatggtgggcgtcagcatcaaccggccttcaaagttgatgtggtagataccacaggtgcgggtgatgtttttcacggcgctttggcggtggcgctggcaacaagtggggatttagcggagtcagtccgcttcgccagcggtgtagcggcgttaaaatgcacacgtcccggtggacgagccgggatccctgactgtgatcaaacccgatcttttttgtcactttttgtataaaatgccagggtgatggtttttcgaggaattttcatgagccttaccgaactaaccggtaacccgcggcacgaccaactcctcatgctgatcgccgagcgtgggtatatgaatattgatgagctggcaaatctgctggatgtctccacgcagacggtccgccgggatattcgtaaattaagcgagcaaggcctgattacgcgccatcacggtggcgcgggtcgggcttccagcgtcgttaatacggcgttcgagcagcgtgaggtttcgcaaaccgaggaaaaaaaagcgattgccgaagcggtggcagactatattcctgatggttcaacaatatttatcaccattggtacgactgttgagcatgttgcccgggcgttacttaaccataatcatttgcggataatcaccaacagcctgcgtgtggcgcatattctttaccacaacccgcgctttgaagtgatggtgcccggcggtacgttgcgctctcataatagcgggatcattggcccttcagcggcgtcctttgtggctgattttcgtgctgattatctggtaacaagcgttggggcgattgagagcgatggcgcgttgatggagtttgatgtaaacgaagctaacgtggtgaaaacgatgatggcgcacgcgagaaatattctgctggtcgccgatcacactaagtatcatgcttcggcggcggttgaaattggtaacgtggcacaggtcactgcgctctttaccgacgagctgccgcccgctgcgctaaaatcacgcttacaagacagccaaattgaaatcattcttccccaggaagacgcgtagatttttgtgaccgttaacctggcttcataccttgccacatagccaaacccatcctttcccgctacagttaatttcttgtggcgcgaaaggaggcaaaaatgctctatatctttgatttaggtaatgtgattgtcgatatcgactttaaccgtgtgctgggagcctggagcgatttaacgcgtattccgctggcatcgcttaagaagagttttcatatgggggaggcgtttcatcagcatgagcgtggggaaattagcgacgaagcgttcgcagaggcgctgtgtcatgagatggctctaccgctaagctacgagcagttctctcacggctggcaggcggtgtttgttgcgctgcgcccggaagtgatcgccatcatgcataaactgcgtgagcaggggcatcgcgtggtggtgctttccaataccaaccgcctgcataccaccttctggccggaagaatacccggaaattcgtgatgctgctgaccatatctatctgtcgcaagatctggggatgcgcaaacctgaagcacgaatttaccagcatgttttgcaggcggaaggtttttcacccagcgatacggtctttttcgacgataacgccgataatatagaaggagccaatcagctgggcattaccagtattctggtgaaagataaaaccaccatcccggactatttcgcgaaggtgttatgctaaaaaccattcaggacaaagccaggcaccgtacccgtccactatgggcctggctaaaactactctggcaacgcattgatgaggacaacatgacaaccctggcaggtaaccttgcctatgtgtcgttgctctcattagtgccgctggttgccgttgtttttgcgcttttcgccgcttttcccatgttttccgacgtcagcattcagttacgtcactttatttttgccaactttctgcctgctactggcgatgttattcagcggtatatcgaacaatttgttgccaattccaacaagatgaccgccgttggggcgtgcgggctgatcgtcaccgcgttattgttgatgtactccatcgatagcgcgttgaataccatctggcgcagtaaacgagcgcgaccaaaaatttactcgttcgccgtgtactggatgattttaacgctggggccgctgctggcaggggccagtctggcgatcagttcctatttgctctccctgcgctgggcgagcgatctcaatactgtcatcgacaacgtgctgcgtatttttccgttgctgttgtcgtggatctccttctggttgctgtacagcattgttcctaccatccgcgtacctaaccgcgacgcgattgtcggcgcgtttgtcgccgcactcctgttcgaagcaggaaagaaaggtttcgcgctttatatcaccatgttcccgtcatatcagctcatttatggtgtgctggcggtgatccccattctctttgtttgggtctactggacatggtgtatcgtcttgcttggcgcggaaattactgtcactctcggggaataccgcaaactaaaacaagcagctgaacaagaagaagacgacgaaccatgattgcattaattcaacgcgtaacccgtgccagcgtcaccgtggagggagaagtgacgggcgaaattggcgcgggacttttggtgttattgggtgtcgaaaaggatgacgacgaacagaaagcaaaccgtctgtgcgagcgtgtgctcggctaccgcatctttagcgatgccgaaggcaagatgaatctcaacgtgcaacaggcgggcggcagtgtgctggtggtttcccagtttaccctcgccgcagataccgaacgggggatgcgcccaagtttctccaaaggtgcatcaccggatcgcgcagaggcgttatatgactatttcgtcgaacgctgccgtcagcaagagatgaacacgcaaacaggacgcttcgctgcggatatgcaggtatcgctggtcaatgatggccccgtgacattctggttgcaggtatgagccagcttccagggttgtcacgggaaacaagagagagtatcgctatgtatcaccttcgggttccacaaacagaagaagaattagagcgttactatcagtttcgctgggaaatgttgcgtaagcccctgcatcaaccaaaaggttcggaacgcgacgcgtgggatgcgatggcgcatcaccagatggtcgtcgacgagcagggtaatctggtggcggtaggccgactgtatattaatgccgacaatgaagcgtccattcgctttatggccgttcatcccgacgtgcaggacaaagggttaggcacgctgatggcgatgaccctggagtcggtggcgcgtcaggaaggcgttaagcgcgtgacctgtagcgcccgtgaagacgcggtggagtttttcgccaagctggggtttgttaatcagggagaaatcaccacgccaaccaccacgccgattcgccattttttgatgattaagcccgtcgccactctggatgacattctgcatcgcggcgactggtgcgcgcagctgcaacaggcgtggtacgaacatatcccgcttagtgaaaaaatgggcgtgcgcattcagcaatataccgggcaaaaatttatcactaccatgccagaaaccggcaatcagaatccgcaccatacgctgtttgccgggagtttattctcactggcgacgctcactggttggggacttatctggctgatgctgcgtgaacgccacctcggcggaacgattattcttgcggatgcgcatatccgctacagcaagccgattagcggtaaacctcatgcggtagccgacctcggtgccttaagcggcgatctcgaccgtctggcgcgcggacgaaaagcacgggtgcagatgcaggtcgaaatctttggcgacgagacgccgggtgcagtgtttgaaggcacgtatatcgttctgcccgcgaagccatttggcccgtatgaagagggcgggaacgaagaagagtagctgatggagaggggcggtgctgcctctctcattcaggtcatttatattagtccttggctatttcggttatattaaataagaactctataaatttttattcttcgttggctccatacgtgtcttgctacatcactgttcaggagcatttaaatattatttgtagaactgagtggcaattatcgcagataatgcttaattcatcatcttagttcatgtttgagcgatttttgatagtcaaaaccccctctggtgccatacttttctcataaatatttttaaaatctatagctaacaaatattatgcaaagataatggactagcatcattgtcagtatcattcatttactgctctgtatgttatgaataattatgttgtatgtttgctcttaaaccgtgggaaggaggctataatggttgccaatattaatctcattaaacaagaaagttattctgttgttaatttagaaaaacaactttcccgaactgttaccaacaaaattataacgatgagcaagtaaagaccggttggtggcagtactgaccggtctgtgatgaaagattaatttcaccttaaatcctggtgctgttaggatgctgacgtttttcggctacaccattcagattatgcaaataaatatctctgaatataatatattcatagcacccataattcatcctgggcgataactaaaccatttttgagtaataaatgaaacaactgcaacactcttattatttctggaaaacgcctcgcaaaaacaaaacaacatgcaaaaatccgctttttttaaatgattttccggcgtaattttcgcacatacattaatgagtaatatatgtaaggtattggtaatggcgatgaatacggtttttcttcatttatcagaagaggcaattaaacggctgaacaagcttcggggctggcgtaaggtttcacgatctgcaattttacgcgaagcggtagagcaatatctggaacgtcagcaattcccggtgcgtaaagcaaagggaggcaggcaaaagggggaggtagttggtgttgatgatcagtgtaaggagcataaggaatgacaaaaatttttcattcttgaatataaaaaacagatgcccttattctggtattaatacaaggctgttttacttgaacttataataactgcaactgttacatcatatctggaaaacgcctcgcaaaaataaaaaatgatgcgtaaatgagctttctttaaagattcggcaagggtacttttctctccatagattcaaaaatgatattggcgagatatttatgaactctctggcaggtatagatatgggcagaattttactcgatttatcgaatgaggtgattaagcaacttgatgatctcgaggtgcagcgtaatcttcctcgtgcggacctattaagggaagcggtagatcaatacctgataaatcaatcgcaaacagcaagaaccagtgttcctggcatctggcaagggtgtgaggaagatggtgtcgaatatcagcgtaagctgcgcgaggaatggtaatgggaaaaaatgatgtcaatcagattgctgacaacgtgcgcgttgttcatgccggatgcggcgtgaacgccttatccggcctacaaagtcgtataaattcaatgtattgcagtttattggtaggcctgataagcgcagcgcatcaggcaatcttacgcttgtcatcagtctcatgcccataaccttattgatgtggtggtgggtaaattgaggccaaaccggcactggcggcatagcttgaggtggtaacgcggaatacgagagatggtgtcgtcacaccctatgagctgtaatccgggcgacctgcgccacccggaaaacgtcagagattactctccttcacccggaaacaggaacgggttgatggaactgcgggcatagccttcttgctccattcgtgcgtccagtaccagagaggcgaggtcatctgctacggcttcgatttttggatctttttcctgatagagaattttcaggtaagtgtcgcagtcatcgcagctttcggctttaatcgcggcctgttcgtcatccagcgaccagtaatgcagtttgccgctctgctcgcagttgctgcattttacgcgcactacgtgccattcagtttcacacaggttgcagtgcaggtaacgtagcccctgagtggtgccaatttgcaccatgctggacaccggcatagaaccacaaaccgggcaatattgacgttgctcgccgtattcagcgcgggctttgccggggatcagattggccatctgcgcccagtagagcgacagtgcagcccagataaacggcgctttatcgctgctgacggacgagaaatcagaggcaaacagcgcgctggccatatcttccagctcctgagtcgatgccttctccagattctcaatcactgccagcgccgggccgctcatttcaggtttcagctcagcaatcagcgccatcagcagcttttgccagtgcttatcacgcggcagaacgtgaatatccagcgggggcttgccttgtgcgctggcttctttaatgcgcgcagtcagatccatctccagcggatggtcgtacagcaccacttcctgggcgtgggcgataagcgcagcaaagcgcaggtaatcacccagaggattattttctgccagctcgcgcagacgctcggcgcggcggttgtataaattcttgagccgagggaacaataacggcggaatcatatccgccgtacgtttctcgcttgaacccagctcatcttgcgggattatgcgaatactcattcagctttcttttccgttgtcttgcggacctcacggtaccagcgcgggtgatgtttcttcgcccaggcgctggtaacccatccttccaccatggcggtaatcgtgcctttcacccaaagggcggcgtagatatgcaccatgataaccacaattaacgccactgcggcaaatgaatgcagcattaacgcgaatcggatcaccgggattgagaaagcaggcgcaaaataaggacgccagataatcacgccgctcaccagcagcagaaccaggaaaataatcgccgcccagaaaacgcatttctgaccgaagttataacgcccggtgtcacctacttcctcgttgacgacgatcttacgaatattcttcgcccaaaagatatcatcccgattgattaggttgtgatgccagtaacggaaaaacatgatgatgaacgaggcaaacataaccacgccgacaaacgggtgcagaattcgcgccagctgcggtgtgcccatgatttgcatcaaccagttgaaggacgggaacaaaaagcccagcccgctcaccgccgccaggatgaagcagaaggcggtgatccagtggttgatacgttccggcgcggtgtagcgcacgatggtgtcacgtcgtttcatttgcgctcctcgtctttctcttcgtgcagattattctcttcctcatccgcacggttcggaccgacacccacgtagtggaagatactggccgcaaaggtagccgcaaagccaacagccgcgagcggtttccagatgcctttccagaatttcacggtttcgctgatttccgggttctccggcaagccatgatacagatttggcttgtcagcatggtgcagcacgtacatgacgtgtgtaccaccgacgcctgccggatcgtacagacccgcattgtcgtaaccgcgggttttcagctcagcaacgcgctcgctcgccagcgttttcatcgactctttcgtaccgaagtgaatcgcgcccgttgggcaggtcttcacgcaggctggttcttgcccaaccaccacgcggtcaacgcacagcgtacatttgtagacgcggttgtcttccgggttgaggcgcggaatgtcgaacggacagcccgcaatgcaataaccgcagccaatgcactgctcggactggaagtcgacgataccgttggcatactgaataattgcaccttccgccgggcacgctttcaggcagcctggatcggaacagtgcatacagccgtctttgcggatcagccattccagtttgtcgttctgctccacttccgagaagcgcattaccgtccacgatttggcgcttaaatcattggggttgtcgtacaccccaatgttattgccgacggtatcgcgaatgtcgttccactctgaacacgccacctgacaggctttacagccgatacaggtggtaacgtcgatgagtttcgccacttcttcctggaagtcccgcgcctgaggcgcgggggtcagaccgttagtcgcggaacgacgaatgatatcttgagattgataagccatatgtcgtctccgttacaccttttccacattcacaaggaaggacttaaactccggcgtctgcgtgttcgcatcaccaacgaatggcgttaaagtattggcaataaagccttttttagctacgccttcatagccccagtgaatcggaataccgatggtatcgatatctttgccgttcgctttcagcgtgcgaatacgtttggtcaccaccgctttggctttgatatagccacggttggaggagactttcacggtatcgccctgggcaatgccaagtttattcgccagcgactccccgatttccacaaactgctctggctgcaaaatcgcgttcaacagcgcgtgtttggtccagtagtggaagtgctcggtcagacgataggtggttccgacatacgggaacttatcggctttacccaatgcttcggcgtcgtctttaaagatacgtgcagccgggttcgagataacgtttggatgcagcgggttagttcccagcggcgtttcaaacggctcgtagtgttccgggaacggaccttccgccatcttatcgagggcaaacagacgccccatgccttcctgctgcatgataaacggcccgacgccgctacccggaggcgctgcgctgtagtccggaatatcccagccggtccacttagtgccgtcccatttcagcaactgacgcttcggatcccacgggttaccctgcggatctgcggaggcgcggttatacagaatgcggcggttaagcggccatgcccatgcccagcccagcgtgttaccgaggccagacggatcggcgttatcacggcgtgccatctggttgccttccggcgtccagctaccggcgaaaatccagcagccacaggaggttgtaccgtcatcgcgcaattgggcgaacgaactaagttgttggcctttcttgacgataaccgcaccggttgccggatcggtaatatcggccagcgccttaccgttgctctccatcgccacttcttctgaagatggctcatgcggaatggcgtagttccatgtcatgttcagcacctggtccgggttcgcgccaccctgttcggcatacatcttgcgcaagcgcaggaagataccggagaggatctcgccgtcagtcagcgcaatccccggggcgtccgcacctttccagtgccactgtaaccagcgacctgagttaacgatagaaccgttctcttccgcgaagcaggtcgatggcagacggaacacttcggtctggatcttcgacgagtcaacttcgttcagctcaccgtggttctgccagaagttagaggtttcagtgttcagtgggtcgatggtgacgaggaacttcagtttcgacagacaaccgatcactttgtttttgttcgggaatgaggcaacagggttaaagccctggcagatatagccattgaccttgccctctttcatcatctcgaagtattgcaggacgtcgtagcctttatcccacttcggcaaccagtcaaagccccagctattttccgccgtcgctttatcaccaaagaaggccttcatcatagagacgaagaatttcgggtagttgccccagtagtttacctggccttccagcagcggttttggcgtgttggcggtaaggtaggtttgcagatcggtctgcttctcgcttggcagcgtcatgtaacctggcaggctctgcgacagcagccccaggtccgtcagcccctgaatattggagtgaccgcgcagggcgttaacgccgccgcctgccatccccatattgccgagcagcagctggatcatcgccatcgtacgaatgttttgcgcaccaacggagtgttgcgtccagccgagggcatacaggaacgaggcagttttatcgtgagcactggtttctgcgatgtattcgcagactttcaggaacgcgtcttttggcgtaccacagatgttttcaaccacatctggcgtgtagcgggaaacgtgctgtttcagcaagttccacacgcagcgcggatgttgcagcgtggtatcgcgtttggcgaagccgttttcgtccagttcataagtccaggaggatttatcgtacttgcgtttttccgcgtcgtagccggtgaacaggccatcttcaaagccgtaatcctcacgcacgatcaggctggcgttggtataggcttcggtgtattcgcggttgaatttttcattgttcagcaggtacagcaatacgcctgacaggaaagcaatgtcagtaccggaacgaataggggcatagtagtcagctaccgccgccgtacgcgtaaagcgaggatcgatcacaatcagcttcgcgccgttgtgaattttggcttccatcgcccagcggaacccgaccgggtgagcttcagcggcgttaccgcccatcaccacgacgaggttggcgttcttgatgtcgacccagtggttggtcatcgcaccgcgaccaaatgttggagcaagacttgctaccgttggtccgtgtcagacacgcgcctggttgtcgaccgcgagcatacccagcgcgcgggagaatttttgcgttaaatagccggtttcgttactcgacgcggaagcacacagcatcccggtggagagccagcggttaacagtcacgccttcggcgttttgcgcaatgtagttagcatcgcggtcttctttcatcagtttggcgatgcgatcaaacgcctcttcccaactgatttgctgccatttatcagaacctggcgcacggtattccggaaacttcagacggctttcggagtggatgaaatccaccaggccagcgcctttcggacaaagtgcaccgcggttgaccgggtgatccggatcgccttcgatatggaagatagatgctttggcgttttttgctccgtcaccgaggctgtacatcaacagcccacagcctacggaacaataggtgcaggtattacgggtttcgcgggtgcgcagcagtttatactgccgggtttccgcgagtgctacgctgggtgcaaaacccagtgccgctgccgtggtgcctgccataccgccagcgcagatcttaaagaactgccttctgctgacctgcatggattgctccttgtttcgacattgtcacgtcccatttacattcgcttgctgcgtgtgcagggagtgggagttatttttctttgcggaaggggccgcaaaggtccagaattggctcaatttccctccatccaggaagggtttgtaacagaataccataatgttggtgtgtgtgttcttatctggttaagagaaagtgaaaaaaacacagcgaaaagaaatcgaaaatgtgacaaatatcacaggtgttcgtcaaattgagttatggcggcgtgatgatttacaacacccacggttagatgaggtcgcggaagaagttcccgttgcgctggtctacaacggcatttcgcatgtggtgatgatggcgtcgcccaaagaccttgagtactttgcgctcggtttttcgctttccgaggggattatcgaaagtccgcgcgatatcttcggcatggatgtcgttccttcctgtaatggtcttgaagtacaaattgagctttccagccgccgctttatggggttgaaggagcgccgccgggcgctggcgggacgtacgggctgtggcgtatgcggcgtggagcaacttaatgacatcggaaaaccggtgcagccgctaccgttcacccagacgtttgatctcaacaaactggatgatgcattacgtcatctcaacgattttcagccagtggggcaactgactggttgtactcacgccgctgcctggatgttgccatctggcgaactggtcggcgggcatgaagacgtgggtcgccatgtggcgctggacaaactgttaggccgccggtcacaagaaggggaaagctggcagcaaggtgcggtactggtttccagtcgtgccagttatgaaatggtgcaaaagtcggcgatgtgcggcgtagagattttgtttgcggtgtctgccgcgaccacgcttgctgtagaagtggctgagcgctgtaatctgacactggtaggtttttgtaaaccgggtcgggcaacggtttatacccatccgcagcgtttgagcaattaattaaaataagtcctgcgaaatatattaaattgcaggacttattcatttcgtgaattttattattttatttataaacaaaatgcgtgtagtggcgttttcttttttcatttattatgttcactctcttatctatatatttataaggcaattaaatgaaaaggaatttattatcttccgctattatagtcgccatcatgtccctcggtctgacgggttgtgatgataaaaaagccgaaacagaaacgctcccgcctgccaatagtcaacctgccgcaccagctcctgaagcgaaacctactgaagctcccgttgcaaaagcagaagctaaacctgaaacacctgcgcaaccggtggtcgatgaacaagcggttttcgacgaaaaaatggatgtctatatcaagtgctacaacaagttacagatcccggtacagcgcagtctggcgcgttatgctgactggctgaaagattttaaacaggggcctaccggtgaagagcgtactgtttatggcatctacggcattagtgaatccaacctcgctgagtgtgaaaaaggcgtaaaaagtgctgtggcgttaacgcctgcgctgcaaccaattgatggcgtggcggtgagttatatcgatgctgccgtggcgttgggtaataccattaacgaaatggataaatattacacccaggaaaattataaagacgatgcgtttgcgaaagggaaaacgctgcaccagacattcttaaaaaatctggaagcctttgaacctgtagccgaatcttatcatgcggcgattcaggaaattaatgataagcgtcagcttgcggaactgaaaaatattgaagaaagagaagggaaaacattccactactactctctggcagtcatgatttcagcgaaacaaattaataacctgatatcgcaagataagtttgatgcagaagcggcaatgaagaaagtgtctgaactggaaacgctagtggcgcaggccaaagaagcggataaaggcggcatgaatttctcgtttattaattcggcaggccagtatcaactcgaggctaaaaaatacgttcgccgcatcagagataaagtcccgtactctgactgggataaagagcaacttcaggacgcaaactcaagctggatggtcgaagactctttcccgagagcattacgcgagtacaacgaaatggttgatgactataatagcctgcgttaaacgtttttgatgataaatgcagtgtcggatgcggcgcatccgacacagttcaccccttgtgaagtaactccataaatgcctcatatcctgttaacccggcaataatctccgccggatgctgacacaatatgcttgccagatagctaaatatttttagctcatgacgcgcatcggcggcggcgcaggcgatcaagacatggttaatgacttcgttattcacctcaactggttgggcgagggtaataaaaaatccacgaaaacgtcgctcctgttcgctccagcaatgtgggatggcgaggcgattaacaatcaggttttcaccttcgccttcgcgggcgatgatgcgttgtgcttcatcggcggtaatatggtgttgtgcgactaattgcgcacaaatttgccgggtaatatgttgccagctttcaccgcgtacattcgaataatgaaaacttccgggggcagagaaaaaacgctccggctgttggcgaataaatgccgtcgccagaaaatgttttatttgttcgataccggcagccgtaatgatattttttacggtgatgtaattatttaccgcgtcatccagtaaataatggctgttgttaatgatcaataacggctcaatctcttcgcgaatggcaacaagttcgcttaagctacgggcaataattacccgacaatttaaaacatcgcgctcaatggcgagctgattaatagtggcaatcgcgttctggtccgagagcaaaatgatcggctggcgttcgttttgatgccgctccagcgcacaggcaaaatacaaaccgatcagatcgctgtcgaaaaggggaatatcgagctgttcacgcagtagcgtaataaagtgcagactcatatcaaaggccgcaggccaggcggctttcaggttattcatgctgctctggcggtgctcagcaatccacactggtgcggcaaggcaacgtaataaatgcccggtaatattctcaaccagctgcgcatcaataatattcaatgacgcgatgcccggcaccctttgcagcaacccctgcacattatcggctgaaattacctgcgcttgctgatgctgtttctctatcaaacccgtcagggttcttacagcgttatcaccaagaaacagaccgctatgttcaacgatttgttttatctcgtcaccgggatattgcggccactcatcggtcagttgattacgcagggcgtaaatcgccagaatcaggctggagagataatcaccctgcatgagcggccagcggtgttggttgtcgcaggccgtggataaatgctgaaggttgtctcgtgttatgcccgccagcggaattaaaaacggatctttgcgcagcaagttcgccagcaagataacgcgtttctcttctgtctcatcaatgaaatggcccaaaccagggcggctggccaggcaacaagtgcgttcataacgctgttttaaccggggcagacgctctgctacccacgtttctggcaaattaagcgccgaggcgagttgcgcacggggagtgaaagtattcagtaataacagcgccagcagccgatcgtcgttatcgtgcttttgcagcaactgaaaaaagctgcggcgctcgaagatttccagctgatagcccgcactgccactggcgaaaatgcgggctttgccgttaagggtgaagttgagatagtcaatatcacgcaggatggtcctgcctgaaacgccagtctgttgcgccagctcgccaggcgtgcgcggctgttgctccagcagatcgacaatctttaactggcgttcgtttagcattaatccacctgacggaactggctaaacgcgttgactttctccgcagttaaggtcgtcagaaaaccccgtatcagcgtgagcagagcttcgtaatcggcttttgaaatcataccgctgttggcgtgcagataacgagttggcagacacagcgcgacaaccggacgcccgccgcccatcacgttgtagcgcccgccatccgtcgcaccggttttcatggtggaaaattgcagcggtaaatcgttatgtgcggcacagctttttaacgctgctaccagtttctggttggggaagtagcgcttgtcaaacagcatcagccccggcccctggcccagtttcagcgggtatttaatgttatcaatgcccggaacatcgcccgctacggcggtatccaacacgatcacgacgtccggtttaatgtgttccgccgaggtttgcgccccgcgtagcccaacttcttcttccacactgccaacgccatacagcgtaatttcgggattattcaccgtctgcaatagttcagccatcattgcgcagccgatgcggttatccaacgccttgccgaccactttatcttcgccccagcaggcaaaattggcttccgggctaataaaattaccaatttccacgccgcgcttttccacctcttcgcgactgttcgcgccaatatcaatgaacatctcatcaaatgacagcggttgttgcttttgcttttccgttaacgcatgaggcgcgacggaaccaatcacaccagggattttcactcccttgtgtgtgcgtatggttacccggtggttgagcatcgactgattccaccagccgccaatggtggtaaaacgcagaaaaccgctctcgtcgatgtgggtgaccataaagccgacttcatccatatgtccgacaacggcaacttttggacctttattccccttacgggcaacaaagctgcccagaccatcgaaggtgatttcattcacgcaaggttccagcgtgtttatcagaatgtcgcgaacttcctgttcatcgccgctgacggcgctggcttcgcacaactgttgcagtaactcaatgttcatggacaagctcctgttgcgcggctttcgctttgcggcgtaaccacaatcctttcaggacgataatgaatgaaatgttcagcgcgaggccaatcgccagcaccagataaaacgaacccaccggcgacatcaggccgatcagcgggtcaaagatacccaaaccaggtgccagacgtttgattccgaaagcgatcaccagcacgccggtaatgccgcccgccagcgtattggcggtaatcatcggcaacggagctgccagagcgtaaggaatagccggttcggttgcgactgtggcaccgaccacaatggcactactggcagcctctttttcctgtcgggtaaacagtttgggcgcaatgaacgtcgcaagacccgccgcgacgggcggcatcagcgcgacaacgccgacgatggcgtaccagtcataaatgtgtttttccagcagtgagaagcagaagaaccaggcggttttattgatggggccgcccatatcgaacgccagcatcgcaccgaccagaaacgctgccgcaaacttcattgatggaggaatggtattcaggaagtggagcagcccgcccatgaggtcggacatcaccggcccgataacgtagtaagtgagcacgccgaaaaccagcagagtaacgaacgggatcagcattgaaccgagcagcggttgtaatgctttgccaaggcgcactttgcggaaccagaagacgaaatagccaatcgccagccccagcaccaccgcgccgaggaatcccgcacccgactgggtgccgagcagcgctttgtcgttcgccagatagcaaaccagaaacgccggagcgaaagccggtttatcggcaatcgacgaggcaatataagcgcccatgatggggatcataaaggtgaagccaaggtaaccgatggattcaactacccaggtaaacgacggcgcgcctttcgacatatcggtatacggcaaaccgaactgcaccagcatgttggcaagcgccaccaggataccaccgccgatgacaaacggcagcgccgcagagacgcccgccatcaggtggctcatcacgctaccgctttgcacttcctgtttgccaagcttcacgccgctatctgcggcaaaaagctgcgagtttgtcggtaattcgctgaaaatctggtcgatatttttcaacgcctgggagatggcaatctcataaactttcttcccggcaaaccgcgcgcgatcatcaccgctcaggccacgcccggtagcgagaatgacgtaatcggcagcggcaatctcttcgctggataagcggttttcaacgccactggacccttgagtttccacttttatggtatgaccgagagaacgggctttctgttccagggcttccgccaccatgtaggtgtgagcgatcccggcggggcagttggtgatcgcgacaatacgtaaggatgactccatcgccacttccttatgagctgagggtttgatttaacaaggcaagcacctggtcggtatcgccctgttgcagttgatgaataaattccttgtgaataattttgcgacacagtgtgccgatgattttgacctgatcctcttcgccgctttgcggcacgccgaggcagatccagcaattgacgtcttcgccatcgctggctttccagtcaatagcctgcgctttgcgggcgaataatacgaacggttgtttaacgcaggcgcttttaccgtgcggcacggcgacaccggaaccaaatccagtagagtgcattttttcgcgcagcagcagggtttgcaggaactggtgtgagtcggtgataaaaccgttttgtaacgctattgtcgccaactgcttcagaacggaataagcgccattgccctgaatattcaggtcaatacagcttgcagtaagagctgccattaatcggactccataaaatatattttaatcaattgtaatggtggagcgattaagtgatgagaggcgatatgtcggtaaacaatgacaatttgagacagagtgaaaggtcagatttgcggagtaatgcacataatggttatttaaataaaccacatgaatcattaatgggttattcattatttttgtgatttactcacaatgtatcagggaaatataacttaccgggagatgtaatatgtttaatttttcaaatcgaaatttaaaatattgtgccggaggcatctctggcacattgggcaattacggcaggtaaaacacttcttgcagctcgctactcaccgggctgttatccgggttagcgggcataacatcggtcatatatttccaccaacgttggcaaacatcagtgctggcaaccgcattccagcgttcttcagattcaatctctaccatggcaaacagcagattacgcgctttgtcgagatagatggcgtagttatgcgcaccgtgagatttcagcactgcttccagttctggccagatgggattatgccgacgctgatactcttcgtgggcgtcggggtttacctgcatgacaaaggctttgcggatcatgtttgctccttacagcgccagcgcactggcgagtggcgtaacgccgaaacgcttgccgagcgctatcaactcttcacggctgatggtctgtttcatgccgcccatcgaataaaccttcactaatacttgtgctgatttttctgcggtgtcgattaaaccgaaggtttcatccagcgtcggtccgctgccgaagacgccgtggaagggccacaacaccagcgaatgtttttgcatctcttgtgcggtcgcctggccgatttcgtccgtgccgggcaccatccacggcaaaatgccaacgccatccgggaataccaccagacactcggtgctgtcttcccacagttggcgagtgaagaccgcggtgtcgttttcaagtacataggtgagggcgatcaggttggtggcgtggcagtgcatgatcacccgatctttgccgttggtggctttaatgcgctcgcagtgggaaaggaagtgagccggaagttcggaagtggggacggcttcgttggttaacccccaaagaatgtggtagcccgcgccgtcgctgtcgacgcatgcggatcctctagagtcgacatatggtgatcctgctgaatttcattacgaccagtctaaaaagcgcctgaattcgcgaccttctcgttactgacaggaaaatgggccattggcaaccagggaaagatgaacgtgatgatgttcacaatttgctgaattgtggtgatgtgatgctcaccgcatttcctgaaaattcacgctgtatcttgaaaaatcgacgttttttacgtggttttccgtcgaaaatttaaggtaagaacctgacctcgtgattactatttcgccgtgttgacgacatcaggaggccagtatgaccgtattacatagtgtggatttttttccgtctggtaacgcgtccgtggcgatagaaccccggctcccgcaggcggattttcctgaacatcatcatgattttcatgaaattgtgattgtcgaacatggcacgggtattcatgtgtttaatgggcagccctataccatcaccggtggcacggtctgtttcgtacgcgatcatgatcggcatctgtatgaacataccgataatctgtgtctgaccaatgtgctgtatcgctcgccggatcgatttcagtttctcgccgggctgaatcagttgctgccacaagagctggatgggcagtatccgtctcactggcgcgttaaccacagcgtattgcagcaggtgcgacagctggttgcacagatggaacagcaggaaggggaaaatgatttaccctcgaccgccagtcgcgagatcttgtttatgcaattactgctcttgctgcgtaaaagcagtttgcaggagaacctggaaaacagcgcatcacgtctcaacttgcttctggcctggctggaggaccattttgccgatgaggtgaattgggatgccgtggcggatcaattttctctttcactgcgtacgctacatcggcagcttaagcagcaaacgggactgacgcctcagcgatacctgaaccgcctgcgactgatgaaagcccgacatctgctacgccacagcgaggccagcgttactgacatcgcctatcgctgtggattcagcgacagtaaccacttttcgacgctttttcgccgagagtttaactggtcaccgcgtgatattcgccagggacgggatggctttctgcaataacgcgaatcttctcaacgtatttgtacgccatattgcgaataatcaacttcgttctctggccgaggtagccacggtggcgcatcagttaaaacttctcaaagatgatttttttgccagcgaccagcaggcagtcgctgtggctgaccgttatccgcaagatgtctttgctgaacatacacatgatttttgtgagctggtgattgtctggcgcggtaatggcctgcatgtactcaacgatcgcccttatcgcattacccgtggcgatctcttttacattcatgctgacgataaacactcctacgcttccgttaacgatctggttttgcagaatattatttattgcccggagcgtctgaagctgaatcttgactggcagggggcgattccgggatttaacgccagcgcagggcaaccacactggcgcttaggtagcatggggatggcgcaggcgcggcaggttatcggtcagcttgagcatgaaagtagtcagcatgtgccgtttgctaacgaaatggctgagttgctgttcgggcagttggtgatgttgctgaatcgccatcgttacaccagtgattcgttgccgccaacatccagcgaaacgttgctggataagctgattacccggctggcggctagcctgaaaagtccctttgcgctggataaattttgtgatgaggcatcgtgcagtgagcgcgttttgcgtcagcaatttcgccagcagactggaatgaccatcaatcaatatctgcgacaggtcagagtgtgtcatgcgcaatatcttctccagcatagccgcctgttaatcagtgatatttcgaccgaatgtggctttgaagatagtaactatttttcggtggtgtttacccgggaaaccgggatgacgcccagccagtggcgtcatctcaattcgcagaaagattaattcgccatgccgatgccgacgatgttagcggcgacaataatcaccacacaaccgaggctcaacaccgttaccggacggcgtcctgcattgttccactctttcagcaccagcccgacgataccgccgcacaatacatagaaactcatatgcagcatccaactgatgtagtcatactgcgccggaatgcgggcgtggccccaggcatagaaaaagaattgcagataccacatcaacccgcccagtgtcgagagtaacacattgtgaatgatcagcgattttgccagcgagaagtcggcttttagcgacaaatccttcacttttgccagacgaataaaacagaaaccgaggttaatgatcgcgccgccgcccatgatgacaacatagcttggcagagcgacatacagtggatcgacgccaagtgcggcagcggcttcatgcatcggttttgcggcgttcatcgcaaaggacatcccggcagagaaaatgccgcacatcaccgccagcaccagcccttttttcagattgaactcttcggctttaatgcccatcttgcgctctttcaactgcccggcgcgagttacaatccctacgccaatcagcgccaccagaacgccgagcaacgtcatgcgtccgccttcggtgctaatcaacacatcgaaattgccgttgataattggcgtcatcagcgtaccgacaatcaacgtaatgccaatggcgatgccaattcccatcgacatgccgagataacgcatggtcaggccgtagttgatattaccgatcccccacatagcgccgaacagaaaaacaggcagtcgcgtagagagactaaacgagctgtaatacgcccagaaattcggtagtaacagggcgctgatggcccacggcagaataatccacgaaacaatcccaccgactgaccacatggtttcccatgaccatttttttacttttttgaacggagcgtaaaaacaggctgcactggccgcgccgatcaaatgccaaaatatccccatcgtaatcgcgttactcatcttcttatcctcatcatttttcgtcgcgtcacatctccgacgagatgagtgtaaaaatcgtgctgtcgattaacctttcgcctgttgccgccgttgtcgatttactggcaatcacggcattaagtgggtgatttgcttcacatctcgggcattttcctgcaaaaccatacccttacgaaaagtacggcattgataatcattttcaatatcatttaattaactataatgaaccaactgcttacgcggcattaacaatcggccgcccgacaatactggagatgaatatgagctataccctgccatccctgccgtatgcttacgatgccctggaaccgcacttcgataagcagaccatggaaatccaccacaccaaacaccatcagacctacgtaaacaacgccaacgcggcgctggaaagcctgccagaatttgccaacctgccggttgaagagctgatcaccaaactggaccagctgccagcagacaagaaaaccgtactgcgcaacaacgctggcggtcacgctaaccacagcctgttctggaaaggtctgaaaaaaggcaccaccctgcagggtgacctgaaagcggctatcgaacgtgacttcggctccgttgataacttcaaagcagaatttgaaaaagcggcagcttcccgctttggttccggctgggcatggctggtgctgaaaggcgataaactggcggtggtttctactgctaaccaggattctccgctgatgggtgaagctatttctggcgcttccggcttcccgattatgggcctggatgtgtgggaacatgcttactacctgaaattccagaaccgccgtccggactacattaaagagttctggaacgtggtgaactgggacgaagcagcggcacgttttgcggcgaaaaaataatcatttgccgcctgctgcaatgaggcgtataggccgcatatcagcttaaaaaatgaaccatcgccaacggcggtggtttttttgtgatcaatttcaaaataaaaacaatgatccgataaaaataaaacagcgtttcaattgatgtggttttgatcacttttattgattaaatgaatgtctatcttcgtttccatcaacactgatgctccattgaggaattacgcatcagcccttaaaaatatgccgacaggtgatggaaatgcagataaaacgctcgattgagaaaatcccgggggggatgatgctcgtcccgctattccttggcgcactgtgccacaccttctcgccgggggcggggaaatattttggatcattcaccaacgggatgattaccggtacggtgcccattctggcggtgtggtttttttgcatgggggcgtcaataaaattaagcgcgacgggaacggtactgcgtaaatccggtacgctggtggtaactaaaattgccgtcgcgtgggtggttgcggcaattgcctcgcgtattattccggaacatggtgttgaagttggattctttgccggactttcaacgctggcgctggtggcggcgatggatatgaccaatggcggactttacgcttccatcatgcagcagtacggcacaaaagaagaagctggggcatttgtgttgatgtcgttggagtccgggccgctcatgacgatgattattctgggcactgccgggattgcctcgtttgaaccgcatgttttcgtcggcgcagtattaccgttcctggtgggctttgccctggggaaccttgaccctgaattgcgagaatttttcagcaaagcggtgcaaacgctgattccattctttgccttcgcgctgggcaataccattgatttgactgtgattgcccagactggtttgctggggatcctgttgggtgtggcagtaattatcgtgaccggtattccgttgattatcgccgataaattgattggcggtggcgatggcactgccggaattgccgcttccagttccgcaggggccgcggtagcgacacctgtgctgattgcagaaatggtgcctgcgtttaaaccgatggctccggcagcaacttcgctggtagcgacggcggtcattgtgacttcgattctggtgccaattcttacctctatctggtcacgtaaagtcaaagccagagcagcgaaaatcgaaattttaggtacggtgaaataaacctgcttccttaatccccacagccggatgaactaacgttcgtccggtttgctattgagttcctgcctggatacttaccgcgaaaacagcacgcctgacataaaataaatatggtctaatggggaaatttctcgtggagagggaacagatgcgatatccggttgatgtatacacaggcaagattcaggcttatcccgaaggcaaacccagcgcaattgctaaaatccaggttgatggtgagttgatgctgacggagctggggctggaaggtgacgagcaggcggagaaaaaggttcacggcgggccagacagagcgctgtgtcattatcctcgtgagcattatctctactgggcgcgggaatttccggaacaggcggagttgtttgttgcgcctgcgtttggtgaaaacctctcaaccgacggcctgacggaaagtaatgtttatatgggcgatattttccgctggggagaggcattaattcaggtcagccagccgcgctcgccttgctataaactcaattaccattttgatatcagcgatatagcgcagttgatgcaaaacacaggtaaggtggggtggttgtatagcgtgatagcgccagggaaagtgtctgcggacgcgccgctggagttggtttcccgtgtcagcgatgtgaccgtgcaggaggctgccgccatcgcatggcatatgccgtttgatgacgatcaatatcaccgtttactctccgctgccgggttatcgaaaagctggacgcggacgatgcaaaagcgccgactgagcggcaagatcgaagatttttcccgccggttgtggggaaaataacccccggagtgtaggcctgataagacgctatcagcgtcgcatcaggcatcctgctcaaatgccggatgcggcgtaaacgccttatcctgcctgcaaatgcgaagtttaactccgcttatacagcggcaaccaaatcaccagccgtaaaccgcccagcgggctgtcttctgccttcacccagccacgatgctgctgaatggcggtttcaacaatcgccagccccaaacctgtaccgccagattcacgatcgcgtgcttcatcggtacgatagaacggacggaaaatctgttcgcgatcttccgggctaacgccaggaccatcgtcgtccaccgtaatggtgataccgtctttatctaccgcaaagcccacttcaatcttcgtatgggaataacgcagagcattacgaacaatgttttccagcgcactttccagggcgttcggattgccgtacagcggccacggcccaggcgggaagttaactgtcaacgacttgcccatttgctcggcttcgaacgccgcgttatccagcacttcactccacaactggttggctttgatggtttcgctaaccagcgcgtttttttgctgattacgtgacatcaccaacagatcgttgatcatgctgtccagacgttgcgcttcggtttcaatacgctccagttccttgctttcaccgctacgacggcgcagtaacgccgtacccagttgcagacgcgtcagcggggtgcgcagctcgtgagagatatcagaaagcagacgctgctgagaggtcatcatgcgctccagcgcggtgaccatctggttaaaactggcacctgcggcaaggaattcctgtggccccgcttccagttccgggtgctggcgtaagtttccctgggcaacttcatcggcagcgtttttcagcttacgcgccggttttgccagactccaggccaaccacaacagcagcggcgtactgaccaacatggtgacaatcagcagtaatagcgggcggtcaaacagtaagttaatgaaatcggattgagaactgctggccggacgaatcagataaagttggtaattatcttcgccatcacgcacggagaacggaccgaccagttccacgcggccatactttttcttctgcggatgatcggcgttatcggcctgaccaataaagttacgaatgatctgcatttcgctgcgttcagcgccgatcacgcggccttcggtggtcaccaataacaaacgctgtcctggcggtgcccacttatcaatcgcccggaacagacgccgccaccacattaaatcgttgggcggatcgttcgccagctccgcttcgacatgctgctcaatcatcagcccctgacgctgttcgctatccagaagctcggtcatctggcgtgaatcgagcttgggtaacatcaaaaccaacatcaacaccagcgccagcgtcagccagaagatggcgaagatgcgcgcggttaagctgcctatcatgaagcagaaaccatcagatagccgcgaccacgcaaggttttaaaccacgggtgaccatctttacgatccggcagtttacgacgcaggttggaaatgtgcatatcaatagcgcggtcgaaaggcgtcaggcgtttgcccaacacttcctggcttaaatgttcacgggaaaccacctgacccagatgctgtgccagcaaatagagcagggtaaactcagtaccggttaactccagcgtttgcccgtcgaagctggcttcctgacggcctggattcagcactaaggcatcaacttccagtgtcggtgaaccgttgtcgttgttttgctgttgctcgctccagtgcgaacggcgcaggatcgcgcgaatacgtgccaccagctcacgatcattaaacggtttcgggagatagtcatctgcgcccagctcaaggccgagaacgcgatcaagttcactgccgcgcgccgtcaacataatgacaggcgtctggtgtgtctggcgaagtgcttttaatgtgtcgataccatttttcttcggcatcattacgtcaagcaaaagtaaatcaatgctgtcgtccagaagatcaagcgcctgttccccatcgtgggcaacaatcacgttgaagccttccatctcgagcagctcctttaatagggaagtcagctctcggtcatcatcaactaacaggattttattcattgtttaaatacctccgaggcagaaattacgtcatcagacgtcgctaatccatgactttacgttgttttacaccccctgacgcatgtttgcagcctgaatcgtaaactctctatcgttgaatcgcgacagaaagattttgggagcaaatgatgcgcatagttaccgctgccgtcatggcctcaacgctggcagtcagttcattaagccacgctgctgaagtcggttcaggcgataactggcatccgggtgaagaacttacgcagcgcagtacgcagagccatatgttcgacggcataagtttaaccgaacatcagcgtcagcagatgcgagatcttatgcaacaggcccggcacgaacagcctcctgttaatgttagcgaactggagacaatgcatcgccttgtcaccgcagaaaattttgatgaaaacgctgtgcgcgcacaggcagaaaaaatggcgaatgagcaaattgctcgtcaggttgagatggcaaaagtccgcaaccaaatgtatcgcctgttaacgccggagcagcaagcggttttaaacgagaaacatcaacaacgaatggagcagttgcgtgacgtgacgcaatggcaaaaaagttcatcgttgaagctattgagtagtagcaactcacgttcccagtagtaaaccctgttttccttgccatagacaccatccctgtcttcccccacatgctgtgggggttttttttatcctcaatttgcctgctgcttaatgcattgcagatgatttgcttccgttatactagcgtcagttgatagcgggagtatttatgaatcaatcttatggacggctggtcagtcgggcggcgattgctgcgacggcgatggcttcgctgctattgctgattaaaatttttgcatggtggtataccgggtcggtgagtattctcgccgcgctggtggattcgctggtggatatcggcgcgtcgttgacgaatttattggtggtgcgatattccctgcaacctgccgacgataatcactcgtttggtcacggtaaagctgagtccctcgcggcgctggcgcaaagtatgtttatctccggttcggcactattcctgtttttgacgggtattcaacatctgatatctccaacaccgatgacagatccaggcgtcggggttatcgtgacaattgtggcgctaatttgtacgattatccttgtctcgtttcagcgttgggtggtgcggcggacgcaaagccaggcggtgcgggctgatatgctacattaccagtctgatgttatgatgaacggcgcaattctgctggcgctggggttgtcctggtacggctggcatcgcgccgatgctctgtttgcattgggaatcggcatctatattttatatagcgcgttacgcatgggatatgaggcggtacagtcattactggatcgcgcattgcctgatgaggaacggcaagaaattattgatatcgtgacttcctggccgggtgttagcggcgctcacgatcttcgcacgcggcagtcagggccgacccgctttattcagattcatttggaaatggaagactctctgcctttggttcaggcacatatggtggcggatcaggtagagcaggctattttacggcgttttccgggatcggatgtaattatccatcaggacccctgttccgtcgtacccagggagggtaaacggtctatgctttcataatcagtataaaagagagccagacccgcattttgtgtataaaataccgccatttggcctgacctgaatcaattcagcaggaagtgattgttatactatttgcacattcgttggatcacttcgatgtgcaagaagacttccggcaacagatttcattttgcattccaaagttcagaggtagtcatgattaagaaaatcggtgtgttgacaagcggcggtgatgcgccaggcatgaacgccgcaattcgcggggttgttcgttctgcgctgacagaaggtctggaagtaatgggtatttatgacggctatctgggtctgtatgaagaccgtatggtacagctagaccgttacagcgtgtctgacatgatcaaccgtggcggtacgttcctcggttctgcgcgtttcccggaattccgcgacgagaacatccgcgccgtggctatcgaaaacctgaaaaaacgtggtatcgacgcgctggtggttatcggcggtgacggttcctacatgggtgcaatgcgtctgaccgaaatgggcttcccgtgcatcggtctgccgggcactatcgacaacgacatcaaaggcactgactacactatcggtttcttcactgcgctgagcaccgttgtagaagcgatcgaccgtctgcgtgacacctcttcttctcaccagcgtatttccgtggtggaagtgatgggccgttattgtggagatctgacgttggctgcggccattgccggtggctgtgaattcgttgtggttccggaagttgaattcagccgtgaagacctggtaaacgaaatcaaagcgggtatcgcgaaaggtaaaaaacacgcgatcgtggcgattaccgaacatatgtgtgatgttgacgaactggcgcatttcatcgagaaagaaaccggtcgtgaaacccgcgcaactgtgctgggccacatccagcgcggtggttctccggtgccttacgaccgtattctggcttcccgtatgggcgcttacgctatcgatctgctgctggcaggttacggcggtcgttgtgtaggtatccagaacgaacagctggttcaccacgacatcatcgacgctatcgaaaacatgaagcgtccgttcaaaggtgactggctggactgcgcgaaaaaactgtattaatgatttcggaaaaaggcagattcctttaccctgaaaccgatgacagaagcaaaaatgcctgatgcgcttcgcttatcaggcctacatgaattctgcaatttattgaatttgcaaacttttgtaggccggataaggcgttcgcgccgcatccggcatggacaaagcgcactttgtcagcaatatgaggcggatttcttccgcctttttaatccctcaacatatacccgcaagttatagccaatctttttttattctttaatgtttggttaaccttctggcacgctttgctcatcacaacacaacataagagagtcgggcgatgaacaagtggggcgtagggttaacatttttgctggcggcaaccagcgttatggcaaaggatattcagcttcttaacgtttcatatgatccaacgcgcgaattgtacgaacagtacaacaaggcattcagcgcccactggaaacagcaaactggtgataacgtggtgattcgtcagtcacacggtggctcaggtaaacaagcgacgtcggtaatcaacggtattgaagctgatgttgtcacgctggctctggcctatgacgtggacgcaattgcggaacgcgggcggattgataaagagtggatcaaacgtctgccggataactccgcaccgtacacttccaccattgttttcctggtacgtaagggaaatccgaagcagatccatgactggaacgatctgattaaaccgggtgtttcggtgatcacgcctaatccgaaaagctctggtggcgcgcgctggaactacctggcagcctggggctacgcgctgcatcacaacaacaacgatcaggcaaaagcacaggattttgttcgggcactgtataaaaacgtcgaagttctggattctggcgcgcgtggctccactaacacttttgtcgagcgcggaattggcgatgtactgattgcctgggaaaacgaagctctgctggcagcgaatgaactggggaaagataaattcgaaatcgtcacgccgagtgagtctatcctcgcagagccaaccgtgtcggtggtcgataaagtggtcgagaaaaaaggtactaaagaggtggcggaagcctacctgaaatatctctactcgccagaaggtcaggaaattgccgcgaaaaactactaccgtccgcgcgacgctgaggtggcgaaaaagtacgaaaatgcgtttccaaagctgaagttattcaccattgatgaagagttcggcggctggacgaaagcgcaaaaagagcattttgctaacggcggtacgttcgatcagatcagcaaacgctgatttccccaggataattatcaaacccggtggtttctcgcgaccgggttttttatttgtcacgattttgcgttacccttgcatctctttgaggtacagggaaaaaaagatgaaaaaagcgggtcttctttttttggtgatgatagttatcgccgttgtggctgccggtattggttactggaaattaaccggtgaagagtcggatacattacgtaagattgtccttgaggaatgtttgcccaatcagcagcaaaatcaaaatccttcgccatgtgcggaagtcaaacccaatgccggatacgtggttttaaaagatcttaatggcccactgcaatatctgttgatgccaacgtatcgtattaacggtactgaaagtcctttgttgaccgatccttcaacgccgaacttcttttggttggcttggcaggcgcgtgattttatgagcaaaaaatacggccagccggttcccgatcgcgcggtttctttggcgatcaactcccgcaccgggcgtacgcaaaaccattttcatattcatatctcttgtattcgtcctgatgtgcgcaaacagctggataacaatctggcgaacatcagcagccgctggttgccactgccaggtggtttgcgcgggcatgaatacctggcgcgtcgggtaacggaaagcgaactggtacaacgcagcccatttatgatgctggcagaagaagtacctgaggcgcgggaacatatgggacgctacgggctggcgatggtacggcagagtgataactcatttgtattgctggcgacacaacgaaatctactgacgcttaaccgtgcttcagccgaggaaattcaggatcatcagtgtgagattttgcgttaaggcgaagagttaaggaaagtaagtgccggatatgaaatccggcacctgtcagacttaagcctgtttagccgcttctgcagctttaacgattactgcgaaggcgtcagctttcagagaagcaccaccaaccagcgcgccgtcgatatccggctgagcaaacagttctgcagcgttagacgcgtttacagagccgccgtactgaatgatcacttgttcagcgatgttagcgtcaactttagcgatgtggtcacggatgaatttgtgaacagcctgtgcctgagccggagttgcagatttgccagtaccgattgcccatacaggttcgtaagcgataaccgcaccttcgaatgccgcagcaccctgagttttcagtaccgcgtcgatctgacgtgcgcaaacttcttcagttttgcccgcttcattttcagcttcggtttcaccgatgcacagaaccggagtcaggccctgctctttcagcaccgcgaattttttcgcgatcagttcgtcagattctttgtggtaagtacgacgttcagagtgaccgatgatgatgtactgtgcgccgatgtctttcagcatagcagcagaggtttcaccggtgaatgcgccggacaggttcaggtccacgttttgcgcacccagcatgatgtggctgccttcagcttcgcgcttcgccatatcgatatacatttccggtggtgcgattgcaaccgcacagccagcaacacctgccagctctttacgcaggttagaaaccagctcgtgaaccatgtggcggctgccgttcagtttccagttacccatcactaaaggatgtcgcattttaattctccacgcttataagcgaataaaggaagatggccgccccgcagggcagcaggtctgtgaaacagtatagagattcatcggcacaaaggctttgctttttgtcatttattcaaaccttcaagcgattcagatagcgccagcttaatcggttcaacagcgaaggtcagccccttttcgccgttgtccgcgacaacataacgcagtgcaccttctgtctcggtgtaataacgtttgtttttccccgccgttagtagcgactgcagttttttctggctttgtgttttggtcattaatggggtgagtgtgcggatcaccgctgccatgtattcctgagctttcgctttcgcggctttttgctctggcccctggatgggtagccaggtcatttgaatgcttttgatttttaaggtaccgcgctccagcgctgtagaagcatacaagttctcattaattttacttgcagcacgagtgagattggctttgtcgggactgctgtcgatggcacgaaattcgttcagtggcaggctgggattctggctgttaaagtcttctcgaaactggctgatggagagatcgaaagtaggggctccagccagcagataaggcgcggtcgttgccgtatctggtgtttgtgcatgcgcctctgttgtaacggttaatgcagaacataagagaaaaaacagcgtacaccctggcttcattgacagtaccttttgttatgactggctccgattaaaacgatatctgtcgcccttgtcaaaagggtagaatcctggaaaagacaaccatcaaggaacttacatgaccatacagcaatggttattctcatttaaagggcgtattggacgccgtgatttctggatttggataggcctgtggttcgcaggcatgctggtgcttttctcactggcgggtaagaatctactcgatattcagaccgcggcgttttgccttgtgtgcttgctctggccaacagcggcagtaactgttaagcgcttgcatgatcgcgggcgttccggcgcatgggcatttctgatgattgtggcgtggatgctgctggcgggtaactgggcgattttaccgggtgtctggcaatgggcggtggggcgttttgtcccgacgttgattctggtgatgatgcttatcgatcttggtgcgtttgttggcacacaaggcgaaaataaatatggtaaagatactcaggatgtgaagtataaagccgacaataaatcaagtaattaacctttaatatatctcttactgctatttttttccgggattgttatttccacgatgcaaatgacaatacccggaaaatccttctgaactcttcaccttaagcaatatcaaaaaaaatggtaatccataagatcattacttgtttgttcttcccttaacggcgcattattcttaagtcgtaatcgacagagaggcgaatatacagaggtgccctatgaaagatgtcgtagataaatgcagtactaaaggatgtgcgattgatatcggtacggtgattgataacgacaactgtaccagtaagttttcgcgcttttttgccacccgcgaagaagcagagtcttttatgaccaaactgaaagagcttgccgccgctacatcctctgcagatgaaggggccagcgtggcctataagattaaggatctggaggggcaagttgagcttgatgcggccttcactttctcatgccaggccgagatgattatttttgagttatcactgcgttcgttagcttgatggagttgctttagaaggagttaaacatggcttataaacacattggcgtggcaatttccgggaatgaagaagatgccttactggtgaataaagccctggagctcgccagacataatgacgctcacctgacgttaattcatattgatgatggcttaagcgagttgtatccgggtatctacttccctgcaacagaagatattcttcaattgttgaagaataagtcggataacaagctgtataaactgacgaaaaatattcaatggccgaagacaaaactgcgtattgaacgcggagaaatgccggaaacactgctggaaattatgcaaaaagagcagtgcgacctccttgtctgtggtcatcatcactcatttatcaaccgtttgatgccggcatatcgcgggatgatcaataagatgagtgcggatttgctcatcgtgccgtttatcgataagtaaccgcttaccagtaatgctccgctgtcatatggcccggtcggcgacgtaaatgtttcgtcatctgccgggtctctttcagcaactgttgtgtatcgcgcaccatctgtggattgccgcacagcatcacatggctggtttctttattcatcggcaggccaatcgtgctttccagttccccactttcaattaatgccggtatccgtccggtgagcgaccccgctgccgtttcccgactgaccaccgtctgaatgcgcagttttccttcgtagcgtttttccagttcctgcatcagtggcaaatagcttaagtcggcggcataacgtgcggcgtgcaccaggaccagatttttgaagcgatctaaatctttacctagttgcagaatcgataaataagggccaatcgctgtaccggttgccagcatccatagcgtttcgcagtgcggcacttcatcgagcacaaagaatcctgccgcttcgctaaccacctgcacttcatcgcctggtttcagtgccgccagtcgtgggcttaatttgccatcggggacggtgaccaggtaaaactccagatcgggattatcgggcgagtttacataggagtaggcgcgctggacgcgttcgccgtcgatttcaaggccaagcttggtaaattgcccggcggtaaacggaagcacgggggcgtgaacggtgagactaaacagggcgtcggtccagttctgcactttagtgactttgcctgttacccaatcagccatgtttttctcctgttttgattgacttgccttatcttcgttctccgaacaaaaaaattccagtcccgaaggactggaaggctcaatcgatcaaatcaatcagaggatgtgcacctgcatttccgggtctttgcgatccagatagtggatggactgaatgcggcgaatggtgcgtgacttgccgcggatcagcagcgtttcggtagtcgcgatattgcctttgcggctaatgccttccagcagatcgcctttggtaataccggtggcagagaagatgacgttatcgctgcgcgccatatcgcccaggcgcaatactttaccggcttcgatgcccatcgctttgcagcgtgccagctcctgctcgccaatgcgacgattctcttcgttgtcgcctttgacgtcatgacgcgccagcagacgaccgttcatgtcgccatctaatgcgcggatcaccgccgcagaaactacgccttccggcgcgccaccaataccgtacagcacgtcaacttcgctgtctggcatacaggtgagaattgaggccgcaacgtcgccgtccggaatagcaaatacgcgtacgccgagttgctgcatttcagcgataacggcatcgtggcgtggtttagccagaatcgttaccgtcagttcgctcaacggtttgccgagcgccgccgctacattgcgcaggttatccgccagcggcaggttcagatcaatggtgcctttggctcccggcccgacaatcagcttctccatatacatatccggcgcattgaggaagcagcctttatcgcctactgccagcaccgccagcgcgttagcctggcccatcgccgtcatgcgcgtgccttcaatcggatcaacagcaatatctaccgcgtcgccgcgaccagtaccgactttttcaccaatgtagagcatcggtgcttcgtcgatttcaccttcaccaatgacgatggtgccgtcaatgttgacctggttgagcataatacgcatggcgtttaccgccgcgccgtccgcggtgtttttatcgccgcgtcctaaccatttgtagccagccagcgccgctgattcggtgacgcgggaaaattcgatggcaagttctcgtctcatagcaaactctaagcagtaaggaatggcgcgaagtgtagcacaggggaagggagggattattgatgtgtgcggggttgcccccgcacgtttcgggactaccggatgcggcataaacgcttcattcggcatttacattattcgtcgtgttcttcccacgccatcgcgcgtttaaccgcttttttccagcctgcgtaacggtaattacgctcagtggtttcgatgcctggacggaactcgcgctcaatcaccgctttctcttgcagctcgtcgaggttctgccagaagccaaccgccaggcctgcgagataggccgcacccaatgcggtgacttcgcgcacttccgggcgctcaacgcgggtgccgagaatatcggactggaactgcatcaggaaattgtttgctactgcgccaccatccacgcgcagggcgtgcagacggataccagagtcggcctgcatcgcttccagcacgtcacgcgtctgataagcaatagactccagcgtcgcgcgtataatgtggttagcgttcaccccacgagtcagaccgaaaatcgccccgcgcgcatacgggtcccagtacggcgcacccagcccggtaaatgccggaaccacatacacaccattggtgttttgcactttggtggcgaaatattcggaatcgtaggcgtcgttaatcaacttcatttcatcgcgcagccactgaatggatgcgcctgccataaacaccgcaccttccaacgcatagttcacttcgccagtcgggccgcaggcgatggtggtcagcaggccgttttctgatttcaccgctttctcgccagtgttcatcagcataaagcagccagtgccataggtgttcttcgccatcccttctttcacgcacaactgaccaaacagcgcggcctgctggtcaccggcgatcccggagattggaatacgcgtgccgcctttgccgccaatgttagtctgaccgtatacttcggaagaacgacgcacttctggcagcatctcgcgcggaatatccagcacttccagcattttgtcgtcccagtccagggtatggatgttgaacaacatggtacgagaggcgttggtgtaatcggtcacatggacacggccctgagtcattttccagataagccacgtatcaaccgtaccaaacagcaattcaccacgacgtgcacgctcgcgagagccttccacatggtcgaggatccacttcactttggtgccagaaaagtacgggtcaatcaccagaccggtattgctgcggatataatcttctaaaccgtcacgttttaaatgctcgcagatttctgcggtacgacggcactgccagacaatggcgttatagataggcttgccggtttctttttcccagacaatagtggtttcacgctggttcgtaataccgatagctgcaatttgatcggaactgatatcggctttcgccagcacttctaccagcgtggagctttgggtggcccagatttccattgggtcgtgttctacccaacctggttttgggtagatttgctcaaattcgcgctgcgacacgctaatgatattggcatcgtgatccattacgaccgcgcgggagctggtggtgccctggtcgagcgcaacgatatattttttttcagtcatgtttaattgtcccgtagtcatattacagcgaagctttttgttctgaaggagttgtggtttccttttcttccacaacacagatatcgcaaggcaaatggcgaccaatcagtttgcggtaggcaaatgcacctacaatcgcgccaacgatagggccgaaaagcggcaccaggaagtaaggaatgtctctgccgccggtaaaggcgacattgccccagcccgccagccaggcaaagactttcggaccgaagtcacgcgctgggttcatggcaaaacctgtcaatgggcccatagatgcgccaatgaccgcaatcagtagaccaatcagcaagggagccaaagggccgcgtggtacaccgttgccatcgtccgttaacgccaggatcagccccatcagaatagcggtaatcaccatctcaactgcgaaagcctgcacaaaattgatatgaggattagggtaagtagagaaagtgccagccagatcaacactttcaacgctgccgcgaacaatgtgatgagtctgctcgaagtcgaaaaataaattgtagtaaagcccgtaaactaaagccgcagcacagaaagcgccggcaacttgtgaaacgataaaaggaataactttgcgcttgtcgaaacaggcaaacagccacaatgcaatggtaacagcgggattaagatgcgcgccggaaacccctgcggtcaggtagatggccattgccacccccagtccccaaatgacactgatttcccactgaccaaaagacgcaccagcgacttttagtgctgcaacgcaacccacaccgaagaaaatcaacaacccggtaccgaggaattcagcaatgcactggcctttcaaggttgatgtttgactcataatcggatcctgaagagttaatgtttgttgtatgcgtgaaagtcacggacctccacgatgcttgtaggcatgctgtaaacttatcgttaacgagcaaaaacgagaaatatcgaacttaaaatgtgtgtgcctcgtcataaaatgagcgttatcgcgccatttattccatctgattgtacatgatgcatgtttgttagatcattcgcgcaacaaatttattaacattttcgattgatgtggattatgtcaccaggagaaggatgaaaagtgtggcaaaccgtaatctgcaaggcgtgccgctggacagcgatggcgcggcttcatacaatcggagctaactaaagtgcgctcgtatttattaaggcgtcaccggtaatcgggacgaggatttttatccatcaacgccttgcaattcaggagaggtatgacaatgtcattagaagtgtttgagaaactggaagcaaaagtacagcaggcgattgataccatcactctgttgcagatggaaatcgaagagctgaaagaaaaaaacaactcactgtcgcaggaagttcaaaatgcccagcatcagcgcgaagagctggagcgtgagaacaaccatctgaaagaacagcagaacggctggcaggaacgtctgcaggccctgctgggtcgcatggaagaggtctgattacgcttcatcttccgcgtaatttctttactgtgtaggccaacaggtaacgcagaaaaaaggcaccttgcggtgcctttcttatcattcaatatccagcggatcttctgaaagaataatcccggtattgtcggcataaagatggtcgccggagaagaaggtgacaccgccaaaattgacgcggacatcgctttcgccaatgccttcgccagcggcaccaaccggaattgccgccatcgcctggatgccgatatccaactcttccaggtcatctacctgacgcaccgcgccgtaaatgaccagaccttcccattcattttgtactgccagacgcgccagttcagcatcgaccagtgcgcgacgaacagaaccaccgccatcgacgacaagaacacgaccacggccattctgttcgagcagatcgtacagcaacccgttgtcctcgaaacattttaccgtgattatttgtccgccaaacgacgcccgtccgccaaagttggagaacagcggttccacgacgttaacatcttcttgatagatgtcacaaagctcggaagtatcgtatttcataggcttaacattcagttgctgcgagaattttcagtatatcgcgctatgtgggctgttggcaaaatcatcaattgttaattgatatttgtcagttatgctgcccactggcttaggaatatccctaaaacaaacagcaggttagtcagtaacgctcccttgacagtacgttccagcattggtcgcatcgccaccgggtccatttcccgcatcacataacgggcttgcttcaccagtaatggtgccgccagcaggaacagccagccccacaggctatgcagcgaaaagagattaaacagcgccagacacaccagcgagcccatcagcaggcaggcatgataacgacgcgcgttcacttcacctaagcgcaccaccagcgtgtttttgccattttcgcggtcgctattgatatcacgcaggttattaatattcagtactgccgttgccagcaggccgcatgcggtcgccggaaggatcagtgccggaatcaatgtatgagcctgtaaataccagctccccatgacactcaaccagccaaagaaaaccagtacggaaatatcacccagaccgatataaccataaggacgattgcccacggtgtaggtgatagcggcaatgatcgacaacccgccaagaatcaggaaaccgacaaaatcggccagcgtatggcatgccactgcaaccagtgccagcccggagagacagatgagcacgacggtaataatgagcgcccgtttcatctcttgctgggtaatgacccctttttgcatgccgcgtagcggcccaatgcggtcaggtttatcgctgccttttaccgcatcgccgtaatcattggcgaggttagaaaggatctgtaatagcccggcggtaattagtgccagcagggcgaccagcggatcgaagtgaccttgccaccatgccagcgctgtcccgacgataattgcagcaaaggcgagggggagggttttaggtcgtaaactttccagccacgcctgagttcggctaatttgttgttcagtcataatacgcgccaataaaaatggggcctttcagccccatcaaacaatgatgaaaatgattgaacgcgattataggataaaacggctcagatcttcatctgccaccaacgcatccagatgtttgctcacataatctgcgtcaatagtgatattttgaccgcttaaatcgctggcgtcgtaggaaatctcttccattaaacgctccagaacagtgtgtaaacgacgagcaccgatgttttcggtagattcgttcacctgccatgccgcttccgcgatgcgtttaataccggagtcggtaaactcgatatttacgccttcagtcgccatcagtgctttgtactgcacggtgatagaggcattcggctcggtcagaatacgctcgaagtcgctggtggtcagcgcctgcagttcaacgcggattggcagacgaccttgcagttccgggatcaggtcagacggtttcgcaatctggaacgcgccagaagcgataaacagaatgtggtcagttttgaccatcccgtgtttggtggaaacggtgcaaccttctaccagcggcagcaggtcacgctgaacgccttcacgagaaacatccggaccggaagactcgccgcgcttacagattttgtcgatttcgtcgataaacacgatcccgtgctgctcaacagcgtcgatagcgtcttgcttcagctcttccgggttcaccagtttcgccgcttcttcttcaatcagcagcttcatggcgtctttgattttcagcttacgcgctttttgcttctggccgcccaggttctggaacatggactgcagctggctggtcatctcttccatgcccggaggagccataatttcaacgcccatcggtgctgcggcaagatcgatctcgatttctttgtcatcaagctggccttcacgcagttttttgcggaatgcctgacgagcagcggacggttcctgctgctgttcggtctgtccccagttgtttttagcaggtgggatcagcacgtcgagaatacgttcttctgccagttcttcagcgcgataacggtttttctcgatagcctggacgcgtaccattttcacggcggcatcggtcagatcgcgaataatagaatccacttccttaccgacgtagcccacttcggtgaatttggtcgcttcaactttgatgaacggcgcattcgccagcttagccagacgacgggcgatttcagttttaccgacaccggtcgggccgatcatcaggatatttttcggggtcacttcatggcgcagctcttcgttgagctgcatgcgacgccagcggttacgcagagcaatcgccacagaacgcttggcgttgtcctggccgatgatgtgcttatccagttcgctgacgatttcgcgtggggtcatttcagacatgggagatccttacgctttgtagcttaattcttcgatggtgtggaaatggttggtatagatgcaaatgtcgcctgcaatatccaacgccttttcagcaatttcacgggcgctaagttcagtgttttctaacagcgcgcgcgccgcagcctgggcgtaagggccgccggagccgatagcaataagatcgttttctggctgcaccacgtcaccgttaccggtgatgataagcgatgcagtttcatccgcgactgccagcagtgcttcaagtttgcgcagcatgcgatcggtacgccagtcttttgccagctcaacggcggctttgaccagatggccctgatgcatttccagtttacgttcaaacagttcgaacagcgtaaaagcatccgcagtaccgcccgcaaagcccgcgatgactttgtcgttgtacagacggcggacctttttcacgttgcctttcattacggtattgcccaacgtggcctgaccatcaccagcgatgaccacatggccgttacggcgtacgcttactatagttgtcacgagctgaccccttggttacgaatacagagtacaaaccccgtacaaaagtacggggcataatgcaattatagatgggggggattttgagggtttcaacccccggcggcgagccgaatgcagtttgtatgacccgccatcttcaaccgattgagggtgctgtctgcgttctctttgcctttcaccgggccaatgaccacacgattccagccattgttggtggtgattttcgagtcaaagccttcgaacgccagctgagcacgtaccgtctctgcctgttccgcgcctctgaacgaaccgcactgcaccatccagcggcgttcgtcttttttctccgccgtcggttttggcgcgtcagcggcacgagcaactggcgcagcttgctgcggcttcgactgcgcagtcgtgtgcgcaggagtttgcagcagatcctggtacggctgctgagaagaagccggtttagactggcgcggttgcgcctgtaccggtgcggcttgcgacgtacgcgtctgctgctgccagctttgttcagtcgtacgcgactgctgagccaggcgttgctgttccgctaattgctgcgcctgacgttggcgctgtagcgtttgctgacgctgttccggcgtctgttcattccacggaacttcaaccagctgcgttggctgctggcgcatatcagcctgcatttgttcaagaagctgacgttgttctggtgtcagttgctccggcgttttcacttcaccaccggcagaaggttctgtgggcgcacgcactcccggctggcgactttccagctctttaatgtagcgccagcgttcttctggttttggtggtagtccgtttccggtcactttctggctttgcagcgtctcggactcttctttcttgtgatgcgtaatgaagtacagaccaccgataaaggtcacaagaacggcggcagcaatagcgaccatagcgggagaaaccgcaggcagatttcgttgctttttccgtgaggtgctcttttttcgccgcgaaggtgccggttggctgcggcgtacataatctcgttgtgccactatcgtttcgctgtatttattcgttcgtcagcccgccatgttacttaagcggcgggcctttgaccagtcacggcagtcttaaaggtttactttaaggtaacgcgcgtgttgatccccggatgataagttcgcagtccattaaacgagagccactgccaacgtgttgcccctgcatttgatcaagcaataacagcatagcttcccgaccgatttcgtaacgcggctgcgcgatggttgtcagcggcggatcacaaaattgcgtcaggtcgatgttatcaaaaccgattatggaaaggtcttccgggactttcagcccctggcgttttgcctgagaaagtgcgccgagcgccatcacatcgctatggcagaagacagcagtaggcggttgtggaagatcaagcagctgctgcatcgctttgcttccggcttcgaaggtgaagtcgccacgggcgatgtattgcggatcaaccataatgccgcagcgacgcagcgcctgaacatagccttgcaggcggtagtgacacagcggcatctcttcgggaccggctatacagccaatccgtttatgcccttgctcatataaataatttactgcatcaaatgcggcggtcagattgtcgatatgaactgtaggcagctccagctccggtgcaaattcgttcgccatcaccatcggcggcagattacgctgttcctcaatgctggcatcaaacggcagccttgaacccagcaacaacatgccatcaatttgcttggtgatgatcaaatcgataaaggttttttcctgctgattttgatgcgcacagtcgccaatcagcaccagatatccgtgatttgccgccgtaacttcgataccgcgaataatttcgctaaagaagggatcgcagatatccgggacaatcaccagaatggtgcgggattcattacgcttgacgttgcgccccataggctgcggtaaataacccacttcccgggccgctttttcaacccgattacgggtggcctgggagactttatcgggattcattaatgctcgggagacggtcgctgtagagacttttgccttgagggcaacgtctttcatggtcgcggcagtttcctgcttcttcgctttcacactcactcctcgcctggcacgtcaggcgtactacatccatgtttacttcacatcggcaacatttttagcagatagcgcgtgaaaacggttacagaattttcatgaaaagtgtgatgaatattgaatttttcgatccgcctcgcatcgtgagcggtttaaccctcaatcggatcaacatccagcacccatttcaccttacgggaatccggtattgtattgatgagcgccagcgtaccgttaatgatgtgttgcaagcgcacgcgggaagggtgctgcaacaatatctgccagcgccagcgaccgccacgtttaggtgccagagccggaaccggaccgagaacccacagtttctcgtctgccagtgggctggagaggatcagattacgcagttgttgcaggaacaatggcgcgtgctgattgttatgatcttccgcacgcacaatcacatggctggtccacggcggtagctgcatcattcgccgctcagccagcgcctgttcggcaaaggcgtcgtagcctttatagagcaacgtttgcaacagaggatgttccggatggtgcgtttgcagcaccacttcgccctgtttacccgcacgcccggcacgaccggcgacctgggtgtaaagctgagcgaaacgctctgccgagcgaaaatcggcagaaaacagcgcgccgtccacgtccagtaatgcaaccagcgtcacatccgggaaatggtgacctttcgccagcatttgtgtaccaatcaaaatccgcgcgccgccgcgatgtacttctgccagttgctgttccagcgcccctttgcggctggtggtatcgcggtcgatacgagaaatgggcacgccggggaacaacggcgcgagcgtctgttcaagctgttcggtgcccagccccacggggaccaggtgcgtggaaccgcaggaagggcactggcgcggcaccggacgctgactgtcacagtggtggcagcgcagatggtgctgcgcctgatgcagcgtgtagtagtgatcgcaacgtgggcattcggcaatccagccacagtcgtggcacagcagtgcaggcgcaaagccacggcggttaagaaagagaatgacctggttatcagcctgtaaatgctggcgcatacgagtgattaacgccggagccagacctgcctgcaccttctgaccttttaaatccagcacatgttgaattgccggacgcgcattccctgcccgacgggtcaggcgcagcaggcggtattttttctgctggacgttgcataacgtttccagcgcgggcgttgcggagccaagaataatcgggatttgctcgctgtgcgcacgatacaccgccaggtcgcgggcatgatagcgccagccttcctgctgcttgtaggagctgtcgtgctcttcatcaatgacaatcacgccgagatttttaaacggcgtaaacagcgcggagcgggtgccgatcacaatcgccgcctcaccatttttcgctttcagccacgccgaaagacgctcgctgtcgttcaggccggaatgcagaacttccacgggggcattaaaacgttcacgaaaacgggcgatagtttgcggtgtcaggccgatttccggcaccatcaccagcgcctgtttgccctgagcgagcacgttttccagtacgctgagataaacctccgttttaccggaaccggtaacgcccgccagcagccaggcagaaaaagtatctgccgcgctatgaattgcgccaacggcggtggcctgttcggtattcaatcgcaaccgctcaccagaaacggcatagttcgttcgccagtcgctaaactctggtgtttcacttgctaaatcacacagaccttttttgcgtagcgcctgcaacgcggcatcattaaattcgagcgtggcgacctggtcgcgccagattttgccttgccgtaacgccgccagcgcctgttgttgcttgggggagcgtttcaggctgttcagatccaccgcctggccttgttcagtggcaaaccagtaccacatcggcgcgttcgccgcaggccgcccctggcgtagtaaaatcggcaaggcatgaaacagcacatcgccaatcggatgatgatagtaatctgccgcccatagcagcaatcgccagacggagtgagtaaacaccggctcactatccagcacttcgactaccgcttttagctcattgagcggcagttcgctggcatcgctaactgataccacaatcccgatgcgctcctgctgtttgccaaacggcacgcgcacgcgacacccagctttaaccgtcatgccttctggcagcagatagtcaaaggtacgaggaagcggaacgggcaaggcaacgtgggcaacgggcatagcatcatcctgacttgaaattcggtgggttagtatacacattgccgtagaagagtgcggatcagtttgcatacgctggttaatttctgtatgatttcgcgccttcgtacgaaatgatcgtattgaagctatacttttaacatcgcgtggtgtctggcgttagggctggaagagcgacgcggccttaaaccgaggttttcccatgaaaaaagatattcacccgaaatacgaagaaattactgctagctgctcttgcggtaacgtaatgaaaatccgctccaccgttggtcatgacctgaacctcgacgtgtgcagcaagtgccacccgttcttcactggcaaacagcgtgatgttgctaccggtggccgtgttgaccgcttcaacaagcgtttcaacatcccgggcagcaaataagaccggatttccgaaaaaagcgccgcacggcgctttttttgtgcctgaattttggtcgtattaccacgaaaacagcggccattctttggcgaccgtggtgagttgtggcgcatcgaaaacggcttgtggcgagaccaccgtttcctcaagcggaatattcttgccgtaacgttctttgagctttgcctgaacttgtgggctgctcaggtcgaactctttcaacttctgctgctcgcccacgcgcattcccagcgcgttctggtaaaccttccacaccacttccgaacagtactggcgatcgtcgctccatgagaagctgaaatcatacggtttaccgagataacgttttgccgtttgcgccagtttttgctgttgttcaacactcagtccgccttcaacgcggcgaacaacgtatttgcccttttcaccatgggcgatccactgcttgagcggggtgtatttcaccgggccgactgcttcaaaaacgtagggctttttgttgcgtatcaccagcataccggtgtggctataatcggtatgggtcgccagttggatcgctttactttgcgatgagcgagagatctgaaagatgatgtcgccggtttgtggctgccaggcaaaggcaggtacagaaaccagcaggctgaggatcagcagcctgtttttcatagttaaacgtccatgtataaaaagcggtgggtcgcagacaacgtgctcgttgtttatgccggatgcggcgtgaacgccttatccggcctacaagttcgtgcaaattcaataaattgcaatatgacgtaggcctgataagcgtagcgcatcaggcgattccactccgcgccgctcttttttgctttagtattcccacgtctccgggttaatccccatctcacgcatgatctcttttgccgcttccgggatttcgtcgctgcgctctttacgcagatcggcatcatccggcaaaggttgcccggtaaaggcatgcagaaacgcttcgcacagcagctcgctgttggtagcgtgacgcaggttgttcacctgacgacgcgtgcgttcatcggtgaggatttttaacaccttaagaggaatggaaaccgtaatctttttgacttgttcactcttcttgccgtgctcagcgtatgggctgatatattcgccgctccattcagccatgagatacttaatcctcttcgtcaataaattgagaccagaccacacagttgatgtgggtactgaccgtaaacccgcatagtttaccgtacaggcgttaccgtgacatcgtgtaatgcacctgtcggcgtgataatgcatataattttaacggctatttgggatttgctcaatctatacgcaaagaagtttagatgtccagatgtattgacgtccattaacacaatgtttactctggtgcctgacatttcaccgacaaagcccagggaacttcatcacatgacgcgtaaacaggccaccatcgcagtgcgtagcgggttaaatgacgacgaacagtatggttgcgttgtcccaccgatccatctttccagcacctataactttaccggatttaatgaaccgcgcgcgcatgattactcgcgtcgcggcaacccaacgcgcgatgtggttcagcgtgcgctggcagaactggaaggtggtgctggtgcagtacttactaataccggcatgtccgcgattcacctggtaacgaccgtctttttgaaacctggcgatctgctggttgcgccgcacgactgctacggcggtagctatcgcctgttcgacagtctggcgaaacgcggttgctatcgcgtgttgtttgttgatcaaggcgatgaacaggcattacgggcagcgctggcagaaaaacccaaactggtactggtagaaagcccaagtaatccattgttacgcgtcgtggatattgcgaaaatctgccatctggcaagggaagtcggggcggtgagcgtggtggataacaccttcttaagcccggcattacaaaatccgctggcattaggtgccgatctggtgttgcattcatgcacgaaatatctgaacggtcactcagacgtagtggccggcgtggtgattgctaaagacccggacgttgtcactgaactggcctggtgggcaaacaatattggcgtgacgggcggcgcgtttgacagctatctgctgctacgtgggttgcgaacgctggtgccgcgtatggagctggcgcagcgcaacgcgcaggcgattgtgaaatacctgcaaacccagccgttggtgaaaaaactgtatcacccgtcgttgccggaaaatcaggggcatgaaattgccgcgcgccagcaaaaaggctttggcgcaatgttgagttttgaactggatggcgatgagcagacgctgcgtcgtttcctgggcgggctgtcgttgtttacgctggcggaatcattagggggagtggaaagtttaatctctcacgccgcaaccatgacacatgcaggcatggcaccagaagcgcgtgctgccgccgggatctccgagacgctgctgcgtatctccaccggtattgaagatggcgaagatttaattgccgacctggaaaatggcttccgggctgcaaacaaggggtaaaaatgagtgtgattgcgcaggcaggggcgaaaggtcgtcagctgcataaatttggtggcagtagtctggctgatgtgaagtgttatttgcgtgtcgcgggcattatggcggagtactctcagcctgacgatatgatggtggtttccgccgccggtagcaccactaaccagttgattaactggttgaaactaagccagaccgatcgtctctctgcgcatcaggttcaacaaacgctgcgtcgctatcagtgcgatctgattagcggtctgctacccgctgaagaagccgatagcctcattagcgcttttgtcagcgaccttgagcgcctggcggcgctgctcgacagcggtattaacgacgcagtgtatgcggaagtggtgggccacggggaagtatggtcggcacgtctgatgtctgcggtacttaatcaacaagggctgccagcggcctggcttgatgcccgcgagtttttacgcgctgaacgcgccgcacaaccgcaggttgatgaagggctttcttacccgttgctgcaacagctgctggtgcaacatccgggcaaacgtctggtggtgaccggatttatcagccgcaacaacgccggtgaaacggtgctgctggggcgtaacggttccgactattccgcgacacaaatcggtgcgctggcgggtgtttctcgcgtaaccatctggagcgacgtcgccggggtatacagtgccgacccgcgtaaagtgaaagatgcctgcctgctgccgttgctgcgtctggatgaggccagcgaactggcgcgcctggcggctcccgttcttcacgcccgtactttacagccggtttctggcagcgaaatcgacctgcaactgcgctgtagctacacgccggatcaaggttccacgcgcattgaacgcgtgctggcctccggtactggtgcgcgtattgtcaccagccacgatgatgtctgtttgattgagtttcaggtgcccgccagtcaggatttcaaactggcgcataaagagatcgaccaaatcctgaaacgcgcgcaggtacgcccgctggcggttggcgtacataacgatcgccagttgctgcaattttgctacacctcagaagtggccgacagtgcgctgaaaatcctcgacgaagcgggattacctggcgaactgcgcctgcgtcaggggctggcgctggtggcgatggtcggtgcaggcgtcacccgtaacccgctgcattgccaccgcttctggcagcaactgaaaggccagccggtcgaatttacctggcagtccgatgacggcatcagcctggtggcagtactgcgcaccggcccgaccgaaagcctgattcaggggctgcatcagtccgtcttccgcgcagaaaaacgcatcggcctggtattgttcggtaagggcaatatcggttcccgttggctggaactgttcgcccgtgagcagagcacgctttcggcacgtaccggctttgagtttgtgctggcaggtgtggtggacagccgccgcagcctgttgagctatgacgggctggacgccagccgcgcgttagccttcttcaacgatgaagcggttgagcaggatgaagagtcgttgttcctgtggatgcgcgcccatccgtatgatgatttagtggtgctggacgttaccgccagccagcagcttgctgatcagtatcttgatttcgccagccacggtttccacgttatcagcgccaacaaactggcgggagccagcgacagcaataaatatcgccagatccacgacgccttcgaaaaaaccgggcgtcactggctgtacaatgccaccgtcggtgcgggcttgccgatcaaccacaccgtgcgcgatctgatcgacagcggcgatactattttgtcgatcagcgggatcttctccggcacgctctcctggctgttcctgcaattcgacggtagcgtgccgtttaccgagctggtggatcaggcgtggcagcagggcttaaccgaacctgacccgcgtgacgatctctctggcaaagacgtgatgcgcaagctggtgattctggcgcgtgaagcaggttacaacatcgaaccggatcaggtacgtgtggaatcgctggtgcctgctcattgcgaaggcggcagcatcgaccatttctttgaaaatggcgatgaactgaacgagcagatggtgcaacggctggaagcggcccgcgaaatggggctggtgctgcgctacgtggcgcgtttcgatgccaacggtaaagcgcgtgtaggcgtggaagcggtgcgtgaagatcatccgttggcatcactgctgccgtgcgataacgtctttgccatcgaaagccgctggtatcgcgataaccctctggtgatccgcggacctggcgctgggcgcgacgtcaccgccggggcgattcagtcggatatcaaccggctggcacagttgttgtaatttcagaaatttaataatgcccggtactcatgttttcgggtttatggtttctaatgaaatatattgaattatcataggattaggccggattaagcgtttacgacgaatccggcaagaagcaataagtacatggttagtttatatttgcagtccggtttgctttgcataccggattttctttttcttaccatcctgaagttttttcatcttccctgatttttcctcaccatcattggtcatttttcggttgacgcccttcggcttttccttcatctttacatctggacgtctaaacggatagatgtgcacaacacaacatataactacaagcgattgatgaggtaaggtatgagcttttttcacgccagccagcgggatgccctgaatcagagcctggcagaagtccaggggcagattaacgtttcgttcgagtttttcccgccgcgtaccagtgaaatggagcagaccctgtggaactccatcgatcgccttagcagcctgaaaccgaagtttgtatcggtgacctatggcgcgaactccggcgagcgcgaccgtacgcacagcattattaaaggcattaaagatcgcactggtctggaagcggcaccgcatcttacttgcattgatgcgacgcccgacgagctgcgcaccattgcacgcgactactggaataacggtattcgtcatatcgtggcgctgcgtggcgatctgccgccgggaagtggtaagccagaaatgtatgcttctgacctggtgacgctgttaaaagaagtggcagatttcgatatctccgtggcggcgtatccggaagttcacccggaagcaaaaagcgctcaggcggatttgcttaatctgaaacgcaaagtggatgccggagccaaccgcgcgattactcagttcttcttcgatgtcgaaagctacctgcgttttcgtgaccgctgtgtatcggcgggcattgatgtggaaattattccgggaattttgccggtatctaactttaaacaggcgaagaaatttgccgatatgaccaacgtgcgtattccggcgtggatggcgcaaatgttcgacggtctggatgatgatgccgaaacccgcaaactggttggcgcgaatattgccatggatatggtgaagattttaagccgtgaaggagtgaaagatttccacttctatacgcttaaccgtgctgaaatgagttacgcgatttgccatacgctgggggttcgacctggtttataaatagtgtggcttttgtgaaaatcacacagtgatcacaaattttaaacagagcacaaaatgctgcctcgaaatgagggcgggaaaataaggttatcagccttgttttctccctcattacttgaaggatatgaagctaaaacccttttttataaagcatttgtccgaattcggacataatcaaaaaagcttaattaagatcaatttgatctacatctctttaaccaacaatatgtaagatctcaactatcgcatccgtggattaattcaattataacttctctctaacgctgtgtatcgtaacggtaacactgtagaggggagcacattgatgagcacgtcagacgatatccataacaccacagccactggcaaatgcccgttccatcagggcggtcacgaccagagtgcgggggcgggcacaaccactcgcgactggtggccaaatcaacttcgtgttgacctgttaaaccaacattctaatcgttctaacccactgggtgaggactttgactaccgcaaagaattcagcaaattagattactacggcctgaaaaaagatctgaaagccctgttgacagaatctcaaccgtggtggccagccgactggggcagttacgccggtctgtttattcgtatggcctggcacggcgcggggacttaccgttcaatcgatggacgcggtggcgcgggtcgtggtcagcaacgttttgcaccgctgaactcctggccggataacgtaagcctcgataaagcgcgtcgcctgttgtggccaatcaaacagaaatatggtcagaaaatctcctgggccgacctgtttatcctcgcgggtaacgtggcgctagaaaactccggcttccgtaccttcggttttggtgccggtcgtgaagacgtctgggaaccggatctggatgttaactggggtgatgaaaaagcctggctgactcaccgtcatccggaagcgctggcgaaagcaccgctgggtgcaaccgagatgggtctgatttacgttaacccggaaggcccggatcacagcggcgaaccgctttctgcggcagcagctatccgcgcgaccttcggcaacatgggcatgaacgacgaagaaaccgtggcgctgattgcgggtggtcatacgctgggtaaaacccacggtgccggtccgacatcaaatgtaggtcctgatccagaagctgcaccgattgaagaacaaggtttaggttgggcgagcacttacggcagcggcgttggcgcagatgccattacctctggtctggaagtagtctggacccagacgccgacccagtggagcaactatttcttcgagaacctgttcaagtatgagtgggtacagacccgcagcccggctggcgcaatccagttcgaagcggtagacgcaccggaaattatcccggatccgtttgatccgtcgaagaaacgtaaaccgacaatgctggtgaccgacctgacgctgcgttttgatcctgagttcgagaagatctctcgtcgtttcctcaacgatccgcaggcgttcaacgaagcctttgcccgtgcctggttcaaactgacgcacagggatatggggccgaaatctcgctacatcgggccggaagtgccgaaagaagatctgatctggcaagatccgctgccgcagccgatctacaacccgaccgagcaggacattatcgatctgaaattcgcgattgcggattctggtctgtctgttagtgagctggtatcggtggcctgggcatctgcttctaccttccgtggtggcgacaaacgcggtggtgccaacggtgcgcgtctggcattaatgccgcagcgcgactgggatgtgaacgccgcagccgttcgtgctctgcctgttctggagaaaatccagaaagagtctggtaaagcctcgctggcggatatcatagtgctggctggtgtggttggtgttgagaaagccgcaagcgccgcaggtttgagcattcatgtaccgtttgcgccgggtcgcgttgatgcgcgtcaggatcagactgacattgagatgtttgagctgctggagccaattgctgacggtttccgtaactatcgcgctcgtctggacgtttccaccaccgagtcactgctgatcgacaaagcacagcaactgacgctgaccgcgccggaaatgactgcgctggtgggcggcatgcgtgtactgggtgccaacttcgatggcagcaaaaacggcgtcttcactgaccgcgttggcgtattgagcaatgacttcttcgtgaacttgctggatatgcgttacgagtggaaagcgaccgacgaatcgaaagagctgttcgaaggccgtgaccgtgaaaccggcgaagtgaaatttacggccagccgtgcggatctggtgtttggttctaactccgtcctgcgtgcggtggcggaagtttacgccagtagcgatgcccacgagaagtttgttaaagacttcgtggcggcatgggtgaaagtgatgaacctcgaccgtttcgacctgctgtaatctgaccccgttcagcggctgcttgctggcagtcgctgaacgttctttaccagcgtatagtgggcgaacgaaaactacacactggatctctcatgtctgccgcaggaaagagcaacccactggcaatcagtggcctggttgtgctcacacttatctggagttatagctggattttcatgaagcaagtcaccagttacatcggtgccttcgactttaccgccttacgctgcattttcggcgctctcgttttattcatcgtccttttattacgtggtcgcggaatgcgcccgacaccgtttaaatacaccttagccattgccctgttacaaacctgcgggatggttggtctggcgcagtgggcgttggtcagcggaggtgcggggaaggtggcgatcctgagctataccatgccgttctgggtggtgattttcgccgcgttgtttctcggtgaacgcctgcgacgtgggcaatatttcgcgattctgattgccgctttcggcttatttttggtgttgcagccgtggcaactcgatttctcttcgatgaaaagtgccatgctggcaatcctctccggcgtcagttggggggcgagcgcgattgttgctaaacgtctgtatgcccgtcatccgcgcgtggatttattgtcgttaacatcctggcagatgctgtatgcggcgctggtgatgagtgtggtcgctttactggtgccgcaacgtgaaattgactggcagcccaccgtgttctgggcgctggcctacagtgcgattctggcgacggcactggcgtggagcttatggttgtttgtattgaaaaacttgcctgccagtattgccagcttaagcacactggccgttcccgtttgcggcgtactcttttcctggtggctgctcggcgagaatccgggggccgttgaaggtagcggtattgtgctgattgtgctggcactggcgctggtgagccgtaagaaaaaagaagccgtcagtgtaaaaaggatctgaattttttcttcatgtggggcgatctcttatttaacaaaataacgataatgccccaccatccgccagttaaacagcacatcttcttcctgcgcgcctgcgccaatgttatgtatcaccagcggcgtaccgtcgcgggcgaagccatctgaaaccaccccaatatgtgccagcccgttatccagtcgccaggagacaatatcgcccgcttgatagtcactggggttcttgctggtggggcgtgttttatcatggcggctaaaccaggtttccagattaggcacccgacggtgatcgatgttgctgtccgggcgctttaacttccatttttgcgggtactcagcaaaattcttcgccatatcttcgtgaaccagtttctgcaaatcgaccttctggctgcgcaatgcgcggatcaccacatcggaacatacaccgcgttcttgcggaacatcaccgccaggataagtaagctgcacatacgccggatcgtaaaatagcgtgctgccaatttgctgtctggcaccgtctgcgatggcaaggttggtattggcctggatttgtaccacggttggtggaacggcgggagattttaaggagtggctggtaaatgccgttagcaggctgagcagcgccagtgaagctttcatctggttcgtccgtgaaaataagagtcacagattcgaccttccgggctaacgattgttctgtagagaaaatgtccagaagcggataaaaaattcctgaacaacgtgggagtttcagattactggcacagagtgccggatgcggagtgaacgccttatccggcctacaaaagcacgcaaattcaatatattgcagagattgcgtaggcctgataagcgtagcgcatcaggcaattttgcgttcaaactcccggacaagccgggagtttggagtaggttattcccactcttgcaggaaacgctgaccgtactggtcggctaccagcagagcggcgtaaacctgatctggcgtcgcgccgccaggcatgttgtgaatggtttcaccttctgcacatgccgcttctgccacaattcgcattttcgccgggacatcttctttaatatccagttgagcgagagttattggcaaacctaccgcatggctaagggcagctacggtttcgatttcctccaccggcgcattttccagaaccagctgcgtcagcgtaccgaatgccactttttcaccgtgataatagtgatgcgcgtccgggatagcggtcaggccgttatgcactgcgtgcgccgcagccagaccaccactttcaaaaccaacaccgctcaaataggtgttcgcttcaatcacgcgctccagcgccggagtcactacatgctgttcggcagcaagcatcgctttttcgccttcttccagcagggtgttgtagcacagttcagccagtgccagcgcagcctgggtgcacttgccgcccgccatggtggtcgcgccgctacgagagcaggcacgcgcttcaaaccaggttgccagcgcatcgccgatacccgccgctaacagacgtgcaggtgcgccagcgacgattttggtgtcgacaatgaccatattcgggttatttggcaacagcagatagcggtcaaactcaccctcatcggtgtagataacagacaatgcgctgcacggtgcatcggtagaggcgatagtcggtgcgatcgctaccggaacacccatgaaatgtgccagtgctttggcagtatcgagggtttttccgccaccgataccgagaattgcgccacactgcgcagtctccgcgatgccacgcagacggtcgatctcattttgcgaacattcaccgccaaacggcgcaatttctactaccagtccagcatctttaaagcttttctcgacagtggattgagcaaaacctaaaacaaatttgtcacccaccactaaccagcgttctgccagcggcttcaggtattcgcccagacgattaatcacatcagcgccctggatgtatttacccggtgattgaataatgcggtccataattgctcctttagagatgagtagtgccaaatgcggcattccagtcgtgttcgaacttctctatagctgactctaccgcaggggtgttgagcatttgttgcgctacatctaagggcagggtgatggattcacatcctgccagtaaacagtccagcgcctgacgcggcgttttaaagctggctgccagcaccatgctttctggcgcgtgcatttctaacagcgtttgcagctcctgaaccgtacgaatgccgtctccgccctgggcatctacgcggttaacatacggagcaacgtattttgcccctgccagtgcggctaataacccttgtgcggcgctatatacagcagtgccaagtgtagtaataccctcttttttcagtattttaattgctgccagaccttcggaagtcaccgggattttcaccacaatacccggaatagcgtcgcgcaggcgcttcgcttcttccaccatcccctgcgcgtcgcggctcatggtctgagcaaacagaatgccctcatcaccaatcgctttttgcagacgcggcagcacttcccatatggactccttgctggcagcgataatgctcgggttagttgtcaccccggcaatggggaatatgcgtgccagacgttcgacttctgcgacgttagcggtgtccagatacagttccatgatgtttccttttacagttccagttcatgttgcagcaggctggcgatagcgtcggcagaggcggcgttaaccagcgcgttacggaattcttcgtgcatgatgcggcgagcgaggcgcgagaaaatgcgcatatgctgatcgcccgcagcgtgtttgttcagggttaacataatgatgaattgcgcttcatcatcgccccagcgcaccggcgcttgcagacgcgccacgctgatggtggattgctcaatgtgttctgatttgctgtgtggaatggcaaaactaaagcccagaccggtagagaaaacggcctcgcgcgcccacaagtcggcttccagtttacgcggatagcggcagcggcccgccagcagcaggttatcggtcatgcctttgagcacttcttctttgctgcgccagtcgctttccagtgtgatgcactcggcggtgaccagcggtgcgtcttgttgggtcatgcggaattgcgccagcaggtgttctacttccagcgaagtacggcaggccattgcctggttgagcaacttgcggcactcacggctatcaagttgcgccatccgagctttcgccgccggaattgatggtgcgctcatgctgagttcatccagccctaagccgaccagcaacggcagcacggaacctttcgctcccagctcaccgcacagaccaatccatttgccctggcgatgcaccgcttgcacggcgtaatcgagcgcccgcaagaatgccggattcaggctgttgtagtgacgagtaaccttagcgttatcgcgatccaccgccagcagatactgcgtcaggtcattactaccaatactaaagaaatcaatctcttcgcagcattgatcgatgatgaacatcaccgacggcacttccagcatgatgccgagctggattttctcatcaaacggaatgtgttcgttacgtagttgctgtttggcttccgccagtttttctttcacccataagatctcttccattgaggagatcatcgggatcatgattttcaggctgccgtgagcggaggcgcggaggatcgaccgtagctgcgtggtaaacaacgacgcgtactcttcataaatacgcacggcgcgataaccgaggaacgggtttgcctctgcgggaatgttcagataatcaacgggtttgtcgccgccaatgtccatagtgcgcacaataatgctgcgtccgttggcggattccagcgcctgacaaaaaatgttgtacaactcgctttcgcccggtgcgctggtgcgatccatatagagcatttcagtgcggaacaaaccaacgccttccgcaccattgccgaatgcggcctgcgcttccacggagtgagcgatgttagcggcaatttcaatgcggataccgtcagcggtacgggcttgttgggtcagccagacacgctgttgctcacgcagggcgtcctgtacgcgggcttcttgctgataataacgagctacggcttcccctggctcaaccacaatcgccccggcgttgccgtcgatataaatcgtttgttgctgccacggagtaagggcatcaatatccacaccaaccagcgttggaatgttgaacgaacgggcaaggatcaccgtatgtgaggtggtgccgccgcttttgagcaacaatcctttgaggtgatttttatccagttcgaggaactggctgggggtcagttcatcagccatacaaatggcgggctgcgtcagtttgcccggtgccgggaagcgttgctcaccgtagatttgctggagtaactggaagcagacgtcgcgtacgtccagggcacgttcttgcaggtagctgctgctggaacgggaaaactcttcgcaaaagtgattcgcgctggcaacaattgcttcggcgcagcttaatccggcgctgacgcctgccagtaaatgttcgcgcagggaagtatcgccagccagggatcggtgagcttccagaatcgcgctggtagcaccgtcgctatccagcagacgaaactcaatgtttttcagtaccagcgtcaggccgttttccagtgcggattgctcggcgtcaacgcctttggctgcgggaagattacccagcgcattgagatctaaagaagagatcggcgtcagaatgccgcctgcactaccgctgcacacggtgcgggcgcggataatttgcggattcagattggtcagtgaaaccggcagtggttccagttcgtcagatttaacttccgccagcggcgcatcgcagtgggggaattcatcgcgcagccattggcttaaacgctggtgcgcttcctgttcgtcggccccggaaatcagtaactggcagttatcgcccgccagcgtatcggtgccaatcagcgcaagggcgcttttggcgttgcccttgcggtcagtgcgcaggttatgccactcaatttgtgatgaaaaagtattacacagcgtttcaacgtggcttgccggacgcgcatgtacgccgttaggtagctcacaaataaattccacaatcagggccattgcctctctcccggtacggttttctgtttacaggataagagcgcacggcaacggcctgccatgtgacaaatctgccaaaagctggacaaatgtaatgtaaccgtcaatttgcgacgcgtctcacaagacgctgttttgcggcatgcttccggtttatcgcaagttatgaggcggatcgcatttttgtactgatattacaaaagtccagtaaatggcctttttatccactgtttgctccgcctgcgattgcctattgtttcctccatcaaaaatatggacatgggctttcgcaagcccgggagcagcttatgaatgagttggtgcagatcctgaaaaatacccgtcagcatttaatgacgggcgtttcacacatgattcccttcgtggtatcgggcggtattttgctggcggtttccgtcatgttgtatggcaaaggcgcagtgccggatgccgtagccgatccaaatctgaaaaaactgtttgatatcggcgttgcgggcttgacgctgatggtgcctttcctcgcagcgtacatcggttattccattgcagagcgttctgcgctggctccgtgcgctatcggtgcctgggttggtaacagctttggtgcgggcttctttggtgcactgatcgccgggattatcggcggcatcgtggtgcattacctgaagaaaattccggtgcataaagttctgcgctcggtgatgcctatcttcattattcctatcgtcggcacactgattaccgcaggcatcatgatgtggggcttgggcgagcctgtaggggcgttgaccaacagcctgactcagtggcttcaggggatgcagcagggcagcattgttatgctggcggtgatcatgggtctgatgctggcgttcgatatgggcggtccggttaacaaagtggcctatgccttcatgctgatttgcgttgctcagggtgtttataccgtggtggccatcgctgccgtgggtatttgtatcccgccgctggggatggggctggcgacgctgattggtcgtaaaaatttctccgcagaagagcgcgaaaccggcaaagcggcactggtgatgggctgtgttggcgttactgaaggggcgattcctttcgccgctgccgatccgctgcgtgtcattccttccatcatggtcggttcagtttgtggtgcagtaactgcggcgctggtcggtgcgcagtgctatgcaggctggggtggtctgattgtgctgccggtggttgaaggcaagctgggttatatcgcagcagtggctgtcggagcagtggtgacggctgtttgtgtgaacgtgctgaaaagtctggcgcgtaaaaatgggtcttcgactgatgaaaaagaagacgacctggatttggattttgaaattaattaattgaggaacgagccatgacgaaaattattgcagtaaccgcatgtccttcaggtgttgcccatacctatatggcagcagaggcgctggaaagtgccgcgaaagcgaaaggctgggaagtgaaagtagaaacccaggggtcaattggtctggaaaatgaactgactgcggaagatgtggcgagcgctgatatggtgattctgaccaaagatatcggcatcaagtttgaagagcgttttgctggcaagaccatcgtgcgcgtcaacatcagcgatgcagtaaaacgtgctgacgccattatgagcaaaattgaagctcacctggcgcaaaccgcttaagttcttctcccgctcgcaagggcgggttcgctttcccacaggagttcctcatgacgaatcgtatctctcgcctcaaaactgcactgtttgccaatacccgtgaaatctcgctggagcgggcgctgctttataccgccagccatcggcaaaccgaaggcgaaccggtgatattgcgccgggcgaaagcaacagcgtatatccttgaacatgttgaaatttcgattcgtgatgaagaactgattgccggtaaccgcaccgtaaaaccgcgcgccgggattatgtcgccggaaatggacccttactggctgctgaaagagctggatcaattcccgacgcgtccgcaggaccgctttgctatcagcgaagaagataaacgtatctaccgtgaagagttgttcccgtactgggaaaaacgttcgatgaaagatttcatcaacgggcagatgacagatgaagtaaaagccgcgaccaacacgcagattttcagcatcaaccagacggataaaggccaggggcacattattattgattacccacgcctgttgaatcacgggctgggtgagctggtggcacagatgcagcaacattgtcagcaacagccggagaatcacttttatcaggccgcgttgttactgctggaagcctcgcagaaacacattttgcgttacgccgaactggcggaaacgatggcggcaaactgcacagatgcccagcgtcgcgaagagctgctgactattgcagagatctcccgccataacgcgcaacataagccgcagacgttctggcaggcgtgccagttattctggtacatgaacatcattctgcaatacgaatccaacgccagttcgctatcgttggggcgcttcgaccagtatatgttgccgttctatcagacatcattaacccagggcgaagatgcggcgttcctgaaagaactgctcgaatctttatgggtgaaatgcaacgacatcgtgctgttgcgctccaccagtagcgcgcgttatttcgccggtttcccgaccggctataccgcactgctcggcgggttaaccgagaacggacgtagcgcggtgaacgtgctttcgttcctttgccttgacgcctatcaaagcgtgcaattaccgcaaccgaacctcggcgtgcgcactaacgccttgatcgacacgccgttcctgatgaaaaccgccgaaaccattcgcttcggtaccggtattccgcaaatctttaacgatgaagtggtggtgccagcgttcctcaaccgtggcgtttcgctggaagatgcgcgcgactattccgtagtgggctgtgtggaattatctattcccggcagaacctacggcttgcatgacatcgcgatgtttaatctgctgaaagtgatggaaatctgcctgcatgaaaatgaaggcaatgctgcgctgacttatgaaggtttactggagcagatccgcgccaagatcagccactacatcaccctgatggttgagggcagcaatatttgtgatatcggccatcgcgactgggcacctgtaccgctgctctcatcgtttatcagcgattgtctggaaaaaggccgcgatattaccgatggcggcgcgcgttataacttctccggcgtacaggggatcggtatcgccaacctgagcgattctctccatgcgttgaaagggatggtttttgagcaacagcgtttaagttttgacgaattgctgtcggtattaaaagccaacttcgcaacgccagaaggcgaaaaagtccgcgctcgcttaattaaccgcttcgagaaatacggtaacgatatcgacgaggtggataacatcagcgccgaactgttgcgccactactgcaaagaagtggaaaaataccagaacccgcgcggcggctacttcacgccgggatcgtataccgtttctgctcacgtcccgttgggatcggtggttggcgcgacgccagacggtcgttttgccggagaacagctggcagacggcggcttgtcacccatgctgggccaggacgcacaagggccaacagcggtactgaagtcagtcagtaagctcgataacacgctgctgtctaacggtacgttgctgaacgtgaaattcactccggcgaccctggaaggtgaagcaggattacgcaaactggccgacttcttacgggcgtttacccagcttaagttacaacatattcagtttaacgtggtgaacgccgacacgttgcgggaagcgcaacagcgcccacaagattatgccgggctggtggtgcgcgttgccggatacagcgccttctttgtcgaactgtcgaaggagatccaggatgacatcatccgccggacagcgcatcagctgtaacgttgtggaaacgcgccgcgatgatgtggcgcgcattttcaacattcagcgttattcactgaatgacggcgagggcattcgtacggtggtcttttttaaaggctgtccgcatctttgcccgtggtgtgctaatccggagtcgatctccggcaaaatccagacggtacgcagagaggcgaaatgtctgcactgtgcgaaatgtttgcgtgatgcggatgaatgcccctccggggcgtttgaacggattggtcgcgatatcagccttgacgctctggaacgggaagtgatgaaagatgacattttctttcgcacgtccggcggcggcgtcacgctttctggcggcgaagtgttaatgcaggcggagtttgctacccgttttttacagcgactgcggctgtggggtgtgtcatgcgccattgaaactgccggagacgcaccagccagcaagctattaccgctggcgaaattgtgcgatgaagtgttgttcgatttaaaaattatggacgcgactcaggcgcgggatgtggtgaagatgaacctgccacgcgtgctggagaatctgcgtttgctggtgagtgagggcgtcaacgtgatcccgcgtttaccgctgatccctggtttcacgctcagccgggagaatatgcagcaggcgctggatgtactgatcccgctgaatatcaggcagatccatctgttaccgtttcatcagtacggcgaaccgaaataccgcctgctggggaaaacatggtcgatgaaagaggtgcctgcgccgtcgtcagctgatgtggcaacgatgcgcgaaatggcagaacgggccggacttcaggttaccgtgggaggttaaaatggcatacctggtggcagtaaccgcctgcgtaagcggcgtggcgcatacttatatggcggcggaacggctggaaaagttgtgcctgttagagaagtggggagtcagcattgaaactcagggcgcgctgggaacggagaatcgtttagcggatgaggatatccgccgggcggatgttgctctgttgattacggatatcgagcttgccggtgccgagcgatttgaacattgccgctatgtgcaatgcagcatctacgcattcctgcgtgagccgcagcgggtaatgagcgcggtgcgcaaagtgctttctgcgccgcagcaaacccatcttattctggagtagtcggtttttctgtcagttggctgtggtactgccggcgatattccgacggcgagcgttcggtgtttttacgaaacagacggcagaagtagttgctgtcgacaaagccgcaggcgtgcgccacttcttttaccttcaggtcatagcctttcaataacgtcttagcgtgctccagtcgcgtgtgattcaggtattcgttaaaaccaatggcccccgttttttgaaacaggtgcgagaggtaatttggcgaaatataaaacgcctgtgcaacagattcgcgggtaagcgcggaggcatagcgttcgtcgatataatcgcgaatagcttcaaatagtgcctggctgcgtgaggcggtctggatttggctgccaagcaaatcgcggcagtggctaagcaggctggcgacgataagccttgccgtttgctgctcctgcggctgcatttgcatttcattgagcgtttgtagcagaaaagaacctatgcgtgggccgcgtcgggcgacgtgttgcttcgccagattttgatattgtttgccatcccattgcacgacgctgaagccgagttgctgtttgccaaacagcacgctaaaggtagtagcgggggcttgccattgtggaaaattccagccaccagcaggaacgtacagcacatcgccgggaactaacgttgctccagcgccggtatcaacaaactcaccttccagcacaatttccagccgtggaaaatcgacctgatacgcaagatcgggcaccgggccgttactgctggcaaagtaaatctggcgcagggacagcgggccgttgatcaggcgggagagcagatagctgacgtcgtgatacatgttattcccttaggtatgtagacgggaaaacagtaactggcattattaaaaaaggccacctgaaaagtgtggcctgaggggagttcgatgtaaacattgcggcagttgtattgccggatgtggcgtaaacgccttatccagcctaccgccgcgatctgtaggccggataagacgcgtcaagcgtcgcatccggcaaatagcgcctggctgataattactgattacccacctgatcgccatagggcagtgtgtcgtaatcgatcagtgcgtttttcttatacgggttaccaatccagcgggtagtttctttgaactgcggattcaccactgaacgggttggatcgtaaccgtcgtaagataagcccgccaaatctgaccaggtgtggatcagttccgccaggctgtatttacgatcaacatcctgcgagaaatcacggggatgagtcgcttgccatttttctgacgtccacagcaggaacggaatggtgtacatatgacgcgtcgggttgtcctcattacgcccctgagttttgtgcggcggcgtgtcgtaaacctcttcaccgtggtcagagaaataaaccaggaaaccgttcgggtttgctgctttaaagtctttaatcaggctggcaaccacatgatcgttatacaggttagcgttgtcataatcgttatatgactccagctcttccgcgtttaatcccggcggaacatgatcggtattgccatcaaacttgccctgattttccgggtagcggtatttgtatttgatatgcgtacccagcagatgaacaatgatcagtttcttcggcgcagggtcattcagcacttcctggaacggcttcagcacgttggtgtcgtattcacgcgcactctgcgtacgttgctggttcatgtagtactgcttgtcggtctggcgcgaaaataccgtcagcatggtattgcgggcggtcatcgtctgctggttggtgatccagaaggttttataacccgcctgtttcatcatgttcatcagcgacggctgcgtcagatacagatccgggttcttttcattggcaaaggtcagcgcctgttgcaggatttcaatggtgtacggacgagacgtaactacgttattaaacacggtcagattcggatcggttttatgcagcgcatccagctccggcgtggtttcacgcggataaccgtacagactcatgcgtccgcgctgggtcgactcgccaatcaccagcactaaagtgcgcggttcgttacccgattcatctttgaaattagccagtggcggcaaggcattattttcattcagtaactttgttagcgagtttagttgctgacgatactgataatagccggtcaggaattgccacggtgcggcaggctccatacgcgaggccaggttatccaacgttttctcaaacggcttgtttttgataaacgtattcatggcgatcggatgcagaatcaagccataaagcagggcaaaagagacaacataacgccacggctttggaatatagaccgggcgcaggcgtgtccacagcagaactgccaccgccgtataggccagcgcgataagcacaattttcaggctgaaatactggcttaaatactcgctggcttcgttggtgttggtttcgaacatcacaaacagaacgctctgcgagaactcctgaccgtagatgacgtagtagcacagcgccgccagagaggccgcccatagcaccacgccgattactgcggcaataattttaatccgcttcggaaagaggaataccgggatcaaccacagcgaactgaataacagcgagtcgcgaatgccgttagtgccactataaccactgatgtaaataatggcctgtagcagagtagagaaaaaccaaaagtagagcagtgcccaacccagggctttccagctaaaaagaggtttagcctggacttctgtggaatgcatagtaagaacctgtcttgaaaaaatatcgccgaatgtaacgacaattccttaaggatatctgaaggtatattcagaatttgaataaaatgcagacagaaatatattgaaaacgagggtgttagaacagaagtatttcagaaaaccctcgcgcaaaagcacgagggtttgcagaagaggaagattagccggtattacgcatacctgccgcaatcccggcaatagtgaccattaacgcttgttcgacgcgaggatccggttcctggccttctttttctgcctggcgggagcggtgcagcaactcggcctgcaatacgttcagcgggtcggtgtaaatattccgtagctgaatagactctgcaatccacggcagatcggccatcagatgggaatcgttggcaatcgccagcaccactttgatgtcttcttcttgcaggttgcgtaactctttacctaacggccacagtgctttgtctaccaggcgttggtcatagtattccgccagccacaggtctgctttggcgaagaccatctccagcatgccgagacgcgtcgagaagaatggccaatcgcggcacatagcctccagctcgctctgtttgccgtcttcgaccactttttgcagcgccgtacctgcacccagccaggcggggagcatcagacggttttgcgtccaggcgaagatccacggaatggcgcgtagtgactcgacgccgccggttgggcgacgtttcgccggacgtgaacccaacggcagtttgcccagttcttgttccggcgtagcggagcggaagtaaggcacaaaatctttgttttcacgtacgtagccgcggtagacatcgcaggagatgactgacagttcatccataatgcgacgccagctctctttcggctccggcggtggcagcaggttggcttccagaatcgccccggtataaagcgacaggctgctgacggtgatttctggcagaccatatttaaagcggatcatctcgccctgttcggttacgcgcaggccgcctttcaggcttcctggcggttgtgacagcagcgccgcatgagcaggtgcgccgccgcgaccaatggaaccgccgcgaccgtggaacaacgtcagctcaatacccgctttttcgcaggttttgattaatgcatcctgtgcctgatattgcgcccaggaagctgccatcactcccgcatcttttgctgagtcggaatagccaatcatcaccatctgtttgccctgaatcaggccacgataccagtcaatattgagcagctgggtcatgacatcgttggcgttgttcagatcatcgagggtttcaaacagcggagcaaccggcatcgcaaacccgatacccgcttctttcagcagcaggtggacagccagtacgtcggacggcgttttcgccatcgagatcacgtaggcggcaatggagccttgcggtgcttcggcaatcacctggcaggtatcgagcacttcgcgcgtttcggcgcttggttgccagttgcgcggcagaagcggacgtttggagttcagttcgcggatcaggaacgcctgtttgtcggcctctgaccagctttcgtagtcgccgataccgaggtagcgggtcagctcgcccagcgcttcggtatgacgcgtgctctcctgacggatatcaatacggaccagcggtacgccgaaacatttcacgcggcgcagggtgtcgagcagatcgccgttggcgataatacccatgccacacgcctgaagtgactggtagcaagcgtagagcggttcccacagttcttcgttttgtgtcagcaggccttctggttttggcagttcttcgcctttcaggcgcgcttccagccatgcctgtgtcgccatcaggcgagaacgcaggtttttcatcagatagcgatacggttctgcggcaccttcttcgccaaccagcgccagcagttcaggggtcgcttcaaccatcgacagttcagaaaccagcacctgaatatctttcaggaacaaatcggtggctttccagcggctgagtagcaggacgtggcgggtgatatcggcagtgacgttcgggttgccgtcgcggtcgccgcccatccacgaagtaaaacggaccggaacaaattcgacgggcagtttgtagccgaggttctcttccagttgttcgttcagttcgcgcaggtaatttggtacgccttgccacaggctgttttccactacggcaaagccccatttggcttcatctaccgggcttggacgcagcttacggatttcatcggtatgccatgactgggcgatcaactggcgcaggcgacgcatcagctggttgtgttcgtagtcagcgatatctttgttatcgagctgttttaaacaggcgttcacttccaccattttgtggatcagtgtacgacgggtaatttcggttgggtgagccgtgaggaccagttccagcgacagcgattccactgcttttttgatggtgtcttcgctcagttccggctggtttttcagtttacgcagggtgcgggcgatcacttccgggttgctggcagcttcgcctttcggcgaaatgctgtggtattgctcggcggtgttggccaggttcaggaactgactaaacgcacgcgcaacgggcagcagctcgtcgttcgacaaattttgtaaggtggtgagcaactcctggcggttagcatcattgccagcgcgtgaagatttcgacaacttacggatagtttctacgcgttcaagaatgtgttctcccaacgcatccttgatggtttctcccagcactttgccgagcatactgacattactacgcaatgcggaatattgttcgttcatattaccccagacaccccatcttatcgtttgatagccctgtatccttcacgtcgcattggcgcgaatatgctcgggctttgcttttcgtcgtcttttataaagccacgtaaaagcggtgacgtcaaatgctgcgaaatcgcttcagcaaacgaataaatagcaggaatttacgtcattaaattcacgacgctttaaataagcgtaacttatggaaatgttaaaaaatcgccccaagtaacaccaaaggtgtaggtcggataagatgcgcaagtatcgcatccgacattattgcggcactggagtttggcaacagtgccggatgcggcgcgagcgccttatccggcctacagttgggcatcgtttgagtcactgtcggtcggataagatgcgcaagtatcgcatccgacattattgcggcactggagtttggcaacagtgccggatgcggcgcgagcgccttatccggcctacggttgggcatcgtttgagtcactgtaggtcggataagatgcgcaagcatcgcatccgacattattgcggcactggagtttggcaacagcgccggatgcggcgcgagcgccttatccggcctacgttttaatgccagcaaaaatggtgaattacctgggttatcagttcgcgggtgggcttgataaaccgtgtttccagatattcatcaggttgatgagcctgattaattgagccaggccccaacaccagcgtcgggcataacgtttgaataaacggcgcttcggtacagtagttcaccacttcggtttttgctccgagcaatttctcaaccacttcaaccagttgatgattcggtgggcattcatagccagggatcggcggatgcagctcgtcgaccgtcagacgacccggccagcgttcgctcaccggagccaatgcatcgttgagcaaaccattaagttcattgagtgtcatgccaggcagcggacgaatatccatatgcaactcacagcaagcgcaaatacggttagaagcgtcgccaccgtgaatatgcccgaggttgagcgtagggtatggcacggtaaacgcttcgtagtgataacgttctttcaggttatcgcgcaattgcaaaatatgcccgatggcgtcgtgcattagttcgatagcgttaactccgcgtgctggatcgctggagtgccccgactggccctgaatacggatggcgttagagatatgacctttatgtgcgcgtaccggttgtagtgacgtcggttcgccaatgatggcgcaatccgggcgcagggcggtagtttcggcaaaataacgcgctccggccatactggtttcttcatcagcagtcgccagaatgtagagcggttttttcagtttcgtgacgtcgacatcgcgtagcgcatcaaggataaacgcaaaaaagcctttcatgtcggcggtgcctaagccgtaaagcttgccgtcatgctccgtcagtgtaaacggatcgcgcgtccagcgaccgtcatcaaatggcaccgtatcggtatgccccgccagcaacaagccgccagccccctgtccgatacttgccagcatattgaatttgttgcgagttcctggaacaggctgcacttccacattgaagcccaaatctttaaaccagtccgccagcagagtgattaaatctgcattgctttgatcgagtgcctcttccgtggcgcttattgaaggtgtggcaatcagagcgcggtaaatctcgataaatggcggtaatttgtttttcattgttgacacacctctggtcatgatagtatcaatattcatgcagtatttatgaataaaaatacactaacgttgagcgtaataaaacccaccagccgtaaggtgaatgttttacgtttaacctggcaaccagacataagaaggtgaatagccccgatgttgaatacgctgattgtgggtgccagcggctacgctggcgcagagctagtgacctatgtaaatcgccatccgcatatgaacataaccgctttgactgtttcagcgcaaagcaatgatgcgggaaagttaatctccgatttgcatccgcagctaaaaggcatcgttgatctgccgttgcagccgatgtcggatatcagcgagtttagcccaggggtggacgtagtgtttctcgccaccgcccatgaagttagccacgatttagcgccgcagtttcttgaagcgggctgcgtggtgttcgacctttccggcgcgtttcgtgttaacgacgccaccttctatgaaaaatattacggctttacccatcaatacccggaactgttggaacaggcagcctacggtctggcggagtggtgcggtaataaattaaaagaagcgaatttgattgcggtgccgggctgttatccgacggcggcacagctggcgctgaaaccgttgattgatgccgatcttcttgacctcaatcagtggccggtgatcaacgccaccagcggcgtgagcggtgcagggcgtaaagcggccatttcaaacagcttttgtgaagttagcctgcaaccgtatggcgtctttactcatcgccatcaaccagagatcgccacacacctcggtgctgacgttatcttcaccccacatctgggcaatttcccgcgcggcattctcgaaaccattacctgccgcctgaaatcgggtgtgacccaggcgcaagtcgcgcaagtgttacagcaggcgtatgcccataaaccgctggtgcggctgtatgacaaaggcgttccggcgctgaaaaatgtcgttgggctgccattttgcgatatcgggtttgccgttcagggcgagcatctgattattgtggcgaccgaagacaacttactgaaaggcgcggcggcacaagcggtacagtgcgccaatattcgtttcggctatgcggaaacgcagtctcttatttaagggtgcaatgatgaatccattaattatcaaactgggcggcgtactgctggatagtgaagaggcgctggaacgtctgtttagcgcactggtgaattatcgtgagtcacatcagcgtccgctggtgattgtgcacggcggcggttgcgtggtggatgagctgatgaaagggctgaatctgccggtgaaaaagaaaaacggcctgcgggtgacgcctgctgatcagatagacattatcaccggagcactggcgggaacggcaaataaaaccctgttggcatgggcgaagaaacatcagattgcggccgtaggtttgtttctcggtgacggcgacagcgtcaaagtgacccagcttgatgaagagttaggtcatgttggactggcgcagccaggttcgcctaagcttatcaactccttgctggagaacggttatctgccggtggtcagctccattggcgtaacagacgaagggcaactgatgaacgtcaatgccgaccaggcggcaacggcgctggcggcaacgctgggcgcggatctgattttgctctccgacgtcagcggcattctcgacggcaaagggcaacgcattgccgaaatgaccgccgcgaaagcagaacaactgattgagcagggcattattactgacggcatgatagtgaaagtgaacgcggcgctggatgcggcccgcacgctgggccgtccggtagatatcgcctcctggcgtcatgcggagcagcttccggcactgtttaacggtatgccgatgggtacgcggattttagcttaagttttgttggccggaggcgcagctttccggcattgaatttcaaaataaggaaacagagttatggcactttggggcgggcgttttacccaggcagcagatcaacggttcaaacaattcaacgactcactgcgctttgattaccgtctggcggagcaggatattgttggctctgtggcctggtccaaagccctggtcacggtaggcgtgttaaccgcagaagagcaggcgcaactggaagaggcgctgaacgtgttgctggaagatgttcgcgccaggccacaacaaatccttgaaagcgacgccgaagatatccatagctgggtggaaggcaaactgatcgacaaagtgggccagttaggcaaaaagctgcataccgggcgtagccgtaatgatcaggtagcgactgacctgaaactgtggtgcaaagataccgttagcgagttactgacggctaaccggcagctgcaatcggcgctggtggaaaccgcacaaaacaatcaggacgcggtaatgccaggttacactcacctgcaacgcgcccagccggtgacgttcgcgcactggtgcctggcctatgttgagatgctggcgcgtgatgaaagccgtttgcaggatgcgcttaagcgtctggatgtcagcccgctaggctgtggcgcgctggcgggaacggcctatgaaatcgaccgtgaacagttagcaggctggctgggctttgcttcggcgacccgtaacagtctcgacagcgtttctgaccgtgaccatgtgttggaactgctttctgctgccgctatcggcatggtgcatctgtcgcgttttgctgaagatctgattttctttaacaccggcgaagcggggtttgtggagctttctgaccgcgtgacttccggttcatcattaatgccgcagaagaaaaacccggatgcgctggagctgattcgcggtaaatgcggccgggtgcagggggcgttaaccggcatgatgatgacgctgaaaggtttgccgctggcttacaacaaagatatgcaggaagacaaagaaggtctgttcgacgcgctcgatacctggctggactgcctgcatatggcggcgctggtgctggacggcattcaggtgaaacgtccacgttgccaggaagcggctcagcagggttacgccaacgccaccgaactggcggattatctggtggcgaaaggcgtaccgttccgcgaggcgcaccatattgttggtgaagcggtggtggaagccattcgtcagggcaaaccgctggaagatctgccgctcagtgagttgcagaaattcagtcaggtgattgacgaagatgtctatccgattctgtcgctgcaatcgtgcctcgacaagcgtgcggcaaaaggcggcgtctcaccgcagcaggtggcgcaggcgattgcttttgcgcaggctcggttagggtaagaacatttatatgtataaatttgagcctggcttatcgccgggcttttttatggcaaaaaaaagcggatcctggagatccgcaaaagttcacgttggctttagttattcgagttgagaaactctcgaaacgggcagtgacttcaagggttaaaagaggtgccgctccgtttctgtgagcaattatcagtcagaatgcttgatagggataatcgttcattgctattctacctatcgccatgaactatcgtggcgatggaggatggataatgaatattcgtgatcttgagtacctggtggcattggctgaacaccgccattttcggcgtgcggcagattcctgccacgttagccagccgacgcttagcgggcaaattcgtaagctggaagatgagctgggcgtgatgttgctggagcggaccagccgtaaagtgttgttcacccaggcgggaatgctgctggtggatcaggcgcgtaccgtgctgcgtgaggtgaaagtccttaaagagatggcaagccagcagggcgagacgatgtccggaccgctgcacattggtttgattcccacagttggaccgtacctgctaccgcatattatccctatgctgcaccagacctttccaaagctggaaatgtatctgcatgaagcacagacccaccagttactggcgcaactggacagcggcaaactcgattgcgtgatcctcgcgctggtgaaagagagcgaagcattcattgaagtgccgttgtttgatgagccaatgttgctggctatctatgaagatcacccgtgggcgaaccgcgaatgcgtaccgatggccgatctggcaggggaaaaactgctgatgctggaagatggtcactgtttgcgcgatcaggcaatgggtttctgttttgaagccggggcggatgaagatacacacttccgcgcgaccagcctggaaactctgcgcaacatggtggcggcaggtagcgggatcactttactgccagcgctggctgtgccgccggagcgcaaacgcgatggggttgtttatctgccgtgcattaagccggaaccacgccgcactattggcctggtttatcgtcctggctcaccgctgcgcagccgctatgagcagctggcagaggccatccgcgcaagaatggatggccatttcgataaagttttaaaacaggcggtttaaaccgtttaacgcagctacccgataggcttccgccatcgtcgggtagttaaaggtggtgttgacgaagtactcaatagtgttgccgccacctttctgttccataatcgcctgaccgatatgaataatttcggcagcgcgctcgccaaagcagtgaatacccagaatctcttttgtttcccgatggaacaaaattttcagcgtgcccacgttcatgccgacgatttgtgcgcgtgccagatgtttaaactgggcgcggcccacttcatatggcactttcattgcggtcagctgctgttcggttttgcccacagagctgatttccgggatggtgtaaataccggtagggatatcttcaatcagatgtgcggtggcttcgccttttaccagcgcctgcgcggcaatgcgcccctggtcataggccgccgacgccaggctcggataaccaatcacgtcgcccaccgcgtaaacgtgtggctgtgcggtctgatacatgctgttgaccttcagctgtccgcggctgtcagtttctagcccaatgttctgtaacgccagcgaatcggtattaccggtgcgaccgttggcatagagcaggcagtcagctttcagttttttacccgacttcagatgcatgatcacaccatcgtcacagccttcgatcttctcgtactcttcgttgtgacgaatcactacgccactgttccagaagtgataggagagagaatctgacatctcttgatcgagaaatgccagcaggcgatcgcgggtgttgatcagatccacttttacatccataccgcggaagatcgacgcatattcacagccgatcactccagcaccatagataagtacatggcgcggttcgtggtgcatgctgagaattgagtcgctgtcgtaaatgcgtggatgggtgaaatcaacatctgttggatgatatggacgagagccgcaggcaataacaaatttttcagcggttagtgtttcaacgctgccgtccgggcaatccagcgccaacgtatgctcgtcaacaaagcgagcgtttccctgcaatatttcacagtgattacgttcgtaaaatccctgacgcatgcgcgtttgttgattaatcacgttatcggcatggttaaggatatcggcaaaagaagagcggagcagtcgggaatggtcgctgtaaagtgggttttgattgaattctataatgcggctgacggcgtgacggagagctttcgacgggatggtgccccagtgggtgcaaccgccgccaacattttgataacgctcgataactgcgacgcgcgcaccttgcttaaccaggcccattgcagcgccttcgccgccggggccggaacctattactatggcatcgtaatcgtaggaatgtggcatggtagggcttacctgttcttatacataaaagcaacagaatggtaacattttatcgcgggtaagccaattgatccccgtcatttatctggctatatcctgagcggcctttgctttgtctgtttcttacttttgccctgacgttttattggatttttatcgacgatactctccgtttaagcggcaggtttccgctgtacgtaaaagaaccggccaaagaattgcagtaaatatgttttattgcgttaccgttcattcacaatactggagcaatccagtatgttcattctctggtatagtgccagcagtacttttggcaaggattcagacatcgtgatgggcgtaagagcgcaacaaaaagaaaaaacccgccgttcgctggtggaagccgcatttagccaattaagtgctgaacgcagcttcgccagcctgagtttgcgtgaagtggcgcgtgaagcggtcattgctcccacctctttttatcggcatttccgcgacgtagacgaactgggtctgaccatggttgatgagagcggtttaatgctacgccaactcatgcgccaggcgcgtcagcgtatcgccaaaggcgggagtgtgatccgcacctcggtctccacatttatggagttcatcggtaataatcctaacgccttccggttattattgcgggaacgctccggcacctccgctgcgtttcgtgccgccgttgcgcgtgaaattcagcacttcattgcggaacttgcggactatctggaactcgaaaaccatatgccgcgtgcgtttactgaagcgcaagccgaagcaatggtgacaattgtcttcagtgcgggtgccgaggcgttggacgtcggcgtcgaacaacgtcggcaattagaagagcgactggtactgcaactgcgaatgatttcgaaaggggcttattactggtatcgccgtgaacaagagaaaaccgcaattattccgggaaatgtgaaggacgagtaatgaaacaagcaaatcaagatagaggtacgctgctgctggcgttagttgctggcttatcgattaatggtactttcgcagcgctgtttagctccattgtgccattttctgtattcccgattatttccctggtgctgacggtttactgcctgcatcaacgttatcttaatcgcactatgccggtaggcttgccgggtctggcagctgcctgttttattctcggcgtactgctgtacagcacggtagttcgtgcggaatatccggatatcggctctaacttcttcccggcagtactctccgtcattatggtgttctggattggcgcgaagatgcgtaaccgtaagcaggaagttgctgagtaatcggtattatgccggatgctggcgcatccggcatgggttttacttcgcggtcagtaatacgccgcactccatatggtgcgtgtaggggaactgatcaaacagagccagacgttcgaccttgtgcgtctggcttaatgtttccagattcttgcataacgtttccgggttacaggagatgtacaaaatacgcggatacgcctgcaccattttctcggtttcactgtccagaccgctgcgcggagggtcgacaaaaatggtttcgcactgataactctttaagtcgatcccttgcaggcggttaaactcgcgcacaccattcatcgcctgagtaaattcttctgccgccatacgaataatttgtacgttatcaatatggttagctgcgatgttgtattgcgcagcagcaaccgacggcttagcgatttcggtggctaatacccgatcaaaattacgcgccagcgctaatgaaaagttaccgttgccgcagtacagctccagtaaatcgccttttgagcctttggttacgtccagcgcccattccagcatctgaatattcatcgccgcgttcggctgggtaaagctgttttctacctgacggtagatcatctctttccctgcgaccggcagacgttcatcgatgtaatcctgatccagctcgattttggttttcgttgcccgaccaatcagatgcacattcagattctgcgcgcgcagtgcatcgcgcagggcctccgcttcctgacgccactcatcatccagcttcttatggtatagcagggaaaccaccgcctgattactcagtgtagtgaggtaatcaatctggaacaacttgtggcgcagaacgggattattacgcacacccgcaatcatcgccgtcatcaactggttgataagttcactggcggcggggaagctatccacgcggatgcggcttttggtttgttgatcgaaaatgatgtgatacaggtcatcgccatcgtgccagatgcggaactccgcgcgcatccggtaatgactgaccggcgagcgaaacacttccggaaccaggtcagaaaacggtgccatcatactttgcaaacgtaccactttttcggctaactgcgcttcatactgttctgttggaaggtgttcgggggtcatgatgtatcctgaaaaattaaagtacgcggcgattgtagggattgctcatcagatgtccagatcttgatgaattcctatttgtgagctacgtctggacagtaacttgttacaacctgtagcatccacttgccggtcctgtgagttaatagggaatccagtgcgaatctggagctgacgcgcagcggtaaggaaaggtgcgatgattgcgttatgcggacactgccattcggtgggaagtcatcatctcttagtatcttagatacccctccaagcccgaagacctgccggccaacgtcgcatctggttctcatcatcgcgtaatattgatgaaacctgcggcatccttcttctattgtggatgctttacaatgattaaaaaagcttcgctgctgacggcgtgttccgtcacggcattttccgcttgggcacaggataccagcccggatactctcgtcgttactgctaaccgttttgaacagccgcgcagcactgtgcttgcaccaaccaccgttgtgacccgtcaggatatcgaccgctggcagtcgacctcggtcaatgatgtgctgcgccgtcttccgggcgtcgatatcacccaaaacggcggttcaggtcagctctcatctatttttattcgcggtacaaatgccagtcatgtgttggtgttaattgatggcgtacgcctgaatctggcgggggtgagtggttctgccgaccttagccagttccctattgcgcttgtccagcgtgttgaatatatccgtgggccgcgctccgctgtttatggttccgatgcaataggcggggtggtgaatatcatcacgacgcgcgatgaacccggaacggaaatttcaggagggtggggaagcaatagttatcagaactatgatgtctctacgcagcaacaactgggggataagacacgggtaacgctgttgggcgattatgcccatactcatggttatgatgttgttgcctatggtaataccggaacgcaagcgcagacagataacgatggttttttaagtaaaacgctttatggcgcgctggagcataactttactgatgcctggagcggctttgtgcgcggctatggctatgataaccgtaccaattatgacgcgtattattctcccggttcaccgttgctcgatacccgtaaactctatagccaaagttgggacgccgggctgcgctataacggcgaactgattaaatcacaactcattaccagctatagccatagcaaagattacaactacgatccccattatggtcgttatgattcgtcggcgacgctcgatgagatgaagcaatacaccgtccagtgggcaaacaatgtcatcgttggtcacggtagtattggtgcgggtgtcgactggcagaaacagactacgacgccgggtacaggttatgttgaggatggatatgatcaacgtaataccggcatctatctgaccgggctgcaacaagtcggcgattttacctttgaaggcgcagcacgcagtgacgataactcacagtttggtcgtcatggaacctggcaaaccagcgccggttgggaattcatcgaaggttatcgcttcattgcttcctacgggacatcttataaggcaccaaatctggggcaactgtatggcttctacggaaatccgaatctggacccggagaaaagcaaacagtgggaaggcgcgtttgaaggcttaaccgctggggtgaactggcgtatttccggatatcgtaacgatgtcagtgacttgatcgattatgatgatcacaccctgaaatattacaacgaagggaaagcgcggattaagggcgtcgaggcgaccgccaattttgataccggaccactgacgcatactgtgagttatgattatgtcgatgcgcgcaatgcgattaccgacacgccgttgttacgccgtgctaaacagcaggtgaaataccagctcgactggcagttgtatgacttcgactggggtattacttatcagtatttaggcactcgctatgataaggattactcatcttatccttatcaaaccgttaaaatgggcggtgtgagcttgtgggatcttgcggttgcgtatccggtcacctctcacctgacagttcgtggtaaaatagccaacctgttcgacaaagattatgagacagtctatggctaccaaactgcaggacgggaatacaccttgtctggcagctacaccttctgaaccacgtcccaccgtgctggtgtttgactccggcgtcggtgggttgtcggtctatgacgagatccggcatctcttaccggatctccattacatttatgctttcgataacgtcgctttcccgtatggcgaaaaaagcgaagcgtttattgttgagcgagtggtggcaattgtcaccgcggtgcaagaacgttatccccttgcgctggctgtggtcgcttgcaacactgccagtaccgtttcacttcctgcattacgcgaaaagttcgacttcccggttgttggtgtcgtgccggcgattaaacctgctgcacgtctgacggcaaatggcattgtcggattactggcaacccgcggaacagttaaacgttcttatactcatgagctgatcgcgcgtttcgctaatgaatgccagatagaaatgctgggctcggcagagatggttgagttggctgaagcgaagctacatggcgaagatgtttctctggatgcactaaaacgtatcctacgcccgtggttaagaatgaaagagccgccagataccgttgtattgggttgcacccatttccctctactacaagaagaactgttacaagtgctgccagagggaacccggctggtggattctggcgcagcgattgctcgccgaacggcctggttgttagaacatgaagccccggatgcaaaatctgccgatgcgaatattgccttttgtatggcaatgacgccaggagctgaacaattattgcccgttttacagcgttacggcttcgaaacgctcgaaaaactggcagttttaggctgatttggttgaatgttgcgcggtcagaaaattattttaaatttcctcttgtcaggccggaataactccctataatgcgccaccactgacacggaacaacggcaaacacgccgccgggtcagcggggttctcctgagaactccggcagagaaagcaaaaataaatgcttgactctgtagcgggaaggcgtattatgcacaccccgcgccgctgagaaaaagcgaagcggcactgctctttaacaatttatcagacaatctgtgtgggcactcgaagatacggattcttaacgtcgcaagacgaaaaatgaataccaagtctcaagagtgaacacgtaattcattacgaagtttaattctttgagcgtcaaacttttaaattgaagagtttgatcatggctcagattgaacgctggcggcaggcctaacacatgcaagtcgaacggtaacaggaagaagcttgcttctttgctgacgagtggcggacgggtgagtaatgtctgggaaactgcctgatggagggggataactactggaaacggtagctaataccgcataacgtcgcaagaccaaagagggggaccttcgggcctcttgccatcggatgtgcccagatgggattagctagtaggtggggtaacggctcacctaggcgacgatccctagctggtctgagaggatgaccagccacactggaactgagacacggtccagactcctacgggaggcagcagtggggaatattgcacaatgggcgcaagcctgatgcagccatgccgcgtgtatgaagaaggccttcgggttgtaaagtactttcagcggggaggaagggagtaaagttaatacctttgctcattgacgttacccgcagaagaagcaccggctaactccgtgccagcagccgcggtaatacggagggtgcaagcgttaatcggaattactgggcgtaaagcgcacgcaggcggtttgttaagtcagatgtgaaatccccgggctcaacctgggaactgcatctgatactggcaagcttgagtctcgtagaggggggtagaattccaggtgtagcggtgaaatgcgtagagatctggaggaataccggtggcgaaggcggccccctggacgaagactgacgctcaggtgcgaaagcgtggggagcaaacaggattagataccctggtagtccacgccgtaaacgatgtcgacttggaggttgtgcccttgaggcgtggcttccggagctaacgcgttaagtcgaccgcctggggagtacggccgcaaggttaaaactcaaatgaattgacgggggcccgcacaagcggtggagcatgtggtttaattcgatgcaacgcgaagaaccttacctggtcttgacatccacggaagttttcagagatgagaatgtgccttcgggaaccgtgagacaggtgctgcatggctgtcgtcagctcgtgttgtgaaatgttgggttaagtcccgcaacgagcgcaacccttatcctttgttgccagcggtccggccgggaactcaaaggagactgccagtgataaactggaggaaggtggggatgacgtcaagtcatcatggcccttacgaccagggctacacacgtgctacaatggcgcatacaaagagaagcgacctcgcgagagcaagcggacctcataaagtgcgtcgtagtccggattggagtctgcaactcgactccatgaagtcggaatcgctagtaatcgtggatcagaatgccacggtgaatacgttcccgggccttgtacacaccgcccgtcacaccatgggagtgggttgcaaaagaagtaggtagcttaaccttcgggagggcgcttaccactttgtgattcatgactggggtgaagtcgtaacaaggtaaccgtaggggaacctgcggttggatcacctccttaccttaaagaagcgtactttgtagtgctcacacagattgtctgatagaaagtgaaaagcaaggcgtttacgcgttgggagtgaggctgaagagaataaggccgttcgctttctattaatgaaagctcaccctacacgaaaatatcacgcaacgcgtgataagcaattttcgtgtccccttcgtctagaggcccaggacaccgccctttcacggcggtaacaggggttcgaatcccctaggggacgccacttgctggtttgtgagtgaaagtcgccgaccttaatatctcaaaactcatcttcgggtgatgtttgagatatttgctctttaaaaatctggatcaagctgaaaattgaaacactgaacaacgagagttgttcgtgagtctctcaaattttcgcaacacgatgatgaatcgaaagaaacatcttcgggttgtgaggttaagcgactaagcgtacacggtggatgccctggcagtcagaggcgatgaaggacgtgctaatctgcgataagcgtcggtaaggtgatatgaaccgttataaccggcgatttccgaatggggaaacccagtgtgtttcgacacactatcattaactgaatccataggttaatgaggcgaaccgggggaactgaaacatctaagtaccccgaggaaaagaaatcaaccgagattcccccagtagcggcgagcgaacggggagcagcccagagcctgaatcagtgtgtgtgttagtggaagcgtctggaaaggcgcgcgatacagggtgacagccccgtacacaaaaatgcacatgctgtgagctcgatgagtagggcgggacacgtggtatcctgtctgaatatggggggaccatcctccaaggctaaatactcctgactgaccgatagtgaaccagtaccgtgagggaaaggcgaaaagaaccccggcgaggggagtgaaaaagaacctgaaaccgtgtacgtacaagcagtgggagcacgcttaggcgtgtgactgcgtaccttttgtataatgggtcagcgacttatattctgtagcaaggttaaccgaataggggagccgaagggaaaccgagtcttaactgggcgttaagttgcagggtatagacccgaaacccggtgatctagccatgggcaggttgaaggttgggtaacactaactggaggaccgaaccgactaatgttgaaaaattagcggatgacttgtggctgggggtgaaaggccaatcaaaccgggagatagctggttctccccgaaagctatttaggtagcgcctcgtgaattcatctccgggggtagagcactgtttcggcaagggggtcatcccgacttaccaacccgatgcaaactgcgaataccggagaatgttatcacgggagacacacggcgggtgctaacgtccgtcgtgaagagggaaacaacccagaccgccagctaaggtcccaaagtcatggttaagtgggaaacgatgtgggaaggcccagacagccaggatgttggcttagaagcagccatcatttaaagaaagcgtaatagctcactggtcgagtcggcctgcgcggaagatgtaacggggctaaaccatgcaccgaagctgcggcagcgacgcttatgcgttgttgggtaggggagcgttctgtaagcctgcgaaggtgtgctgtgaggcatgctggaggtatcagaagtgcgaatgctgacataagtaacgataaagcgggtgaaaagcccgctcgccggaagaccaagggttcctgtccaacgttaatcggggcagggtgagtcgacccctaaggcgaggccgaaaggcgtagtcgatgggaaacaggttaatattcctgtacttggtgttactgcgaaggggggacggagaaggctatgttggccgggcgacggttgtcccggtttaagcgtgtaggctggttttccaggcaaatccggaaaatcaaggctgaggcgtgatgacgaggcactacggtgctgaagcaacaaatgccctgcttccaggaaaagcctctaagcatcaggtaacatcaaatcgtaccccaaaccgacacaggtggtcaggtagagaataccaaggcgcttgagagaactcgggtgaaggaactaggcaaaatggtgccgtaacttcgggagaaggcacgctgatatgtaggtgaggtccctcgcggatggagctgaaatcagtcgaagataccagctggctgcaactgtttattaaaaacacagcactgtgcaaacacgaaagtggacgtatacggtgtgacgcctgcccggtgccggaaggttaattgatggggttagcgcaagcgaagctcttgatcgaagccccggtaaacggcggccgtaactataacggtcctaaggtagcgaaattccttgtcgggtaagttccgacctgcacgaatggcgtaatgatggccaggctgtctccacccgagactcagtgaaattgaactcgctgtgaagatgcagtgtacccgcggcaagacggaaagaccccgtgaacctttactatagcttgacactgaacattgagccttgatgtgtaggataggtgggaggctttgaagtgtggacgccagtctgcatggagccgaccttgaaataccaccctttaatgtttgatgttctaacgttgacccgtaatccgggttgcggacagtgtctggtgggtagtttgactggggcggtctcctcctaaagagtaacggaggagcacgaaggttggctaatcctggtcggacatcaggaggttagtgcaatggcataagccagcttgactgcgagcgtgacggcgcgagcaggtgcgaaagcaggtcatagtgatccggtggttctgaatggaagggccatcgctcaacggataaaaggtactccggggataacaggctgataccgcccaagagttcatatcgacggcggtgtttggcacctcgatgtcggctcatcacatcctggggctgaagtaggtcccaagggtatggctgttcgccatttaaagtggtacgcgagctgggtttagaacgtcgtgagacagttcggtccctatctgccgtgggcgctggagaactgaggggggctgctcctagtacgagaggaccggagtggacgcatcactggtgttcgggttgtcatgccaatggcactgcccggtagctaaatgcggaagagataagtgctgaaagcatctaagcacgaaacttgccccgagatgagttctccctgaccctttaagggtcctgaaggaacgttgaagacgacgacgttgataggccgggtgtgtaagcgcagcgatgcgttgagctaaccggtactaatgaaccgtgaggcttaaccttacaacgccgaagctgttttggcggatgagagaagattttcagcctgatacagattaaatcagaacgcagaagcggtctgataaaacagaatttgcctggcggcagtagcgcggtggtcccacctgaccccatgccgaactcagaagtgaaacgccgtagcgccgatggtagtgtggggtctccccatgcgagagtagggaactgccaggcatcaaataaaacgaaaggctcagtcgaaagactgggcctttcgttttatctgttgtttgtcggtgaacgctctcctgagtaggacaaatccgccgggagcggatttgaacgttgcgaagcaacggcccggagggtggcgggcaggacgcccgccataaactgccaggcatcaaattaagcagaaggccatcctgacggatggcctttttgcgtttctacaaactcttcctgtcgtcatatctacaagccatccccccacagatacggtaaactagcctcgtttttgcatcaggaaagcagctatgaaccactccttaaaaccctggaacacatttggcattgatcataatgctcagcacattgtatgtgccgaagacgaacaacaattactcaatgcctggcagtatgcaaccgcagaaggacaacccgttcttattctgggtgaaggaagtaatgtactttttctggaggactatcgcggcacggtgatcatcaaccggatcaaaggtatcgaaattcatgatgaacctgatgcgtggtatttacatgtaggagccggagaaaactggcatcgtctggtaaaatacactttgcaggaaggtatgcctggtctggaaaatctggcattaattcctggttgtgtcggctcatcacctatccagaatattggtgcttatggcgtagaattacagcgagtttgcgcttatgttgattctgttgaactggcgacaggcaagcaagtgcgcttaactgccaaagagtgccgttttggctatcgcgacagtatttttaaacatgaataccaggaccgcttcgctattgtagccgtaggtctgcgtctgccaaaagagtggcaacctgtactaacgtatggtgacttaactcgtctggatcctacaacagtaacgccacagcaagtatttaatgcggtgtgtcatatgcgcaccaccaaactccctgatccaaaagtgaatggcaatgccggtagtttcttcaaaaaccctgttgtatctgccgaaacggctaaagcattactgtcacaatttccaacagcaccaaattacccccaggcggatggttcagtaaaactggcagcaggttggcttatcgatcagtgccagctaaaagggatgcaaataggtggggctgcggtgcaccgtcaacaggcgttagttctcattaatgaagacaatgcaaaaagcgaagatgttgtacagctggcgcatcatgtaagacagaaagttggtgaaaaatttaatgtctggcttgagcctgaagtccgctttattggtgcatcaggtgaagtgagcgcagtggagacaatttcatgaaggataacaccgtgccactgaaattgattgccctgttagcgaacggtgaatttcactctggcgagcagttgggtgaaacgctgggaatgagccgggcggctattaataaacacattcagacactgcgtgactggggcgttgatgtctttaccgttccgggtaaaggatacagcctgcctgagcctatccagttacttaatgctaaacagatattgggtcagctggatggcggtagtgtagccgtgctgccagtgattgactccacgaatcagtaccttcttgatcgtatcggagagcttaaatcgggcgatgcttgcattgcagaataccagcaggctggccgtggtcgccggggtcggaaatggttttcgccttttggcgcaaacttatatttgtcgatgttctggcgtctggaacaaggcccggcggcggcgattggtttaagtctggttatcggtatcgtgatggcggaagtattacgcaagctgggtgcagataaagttcgtgttaaatggcctaatgacctctatctgcaggatcgcaagctggcaggcattctggtggagctgactggcaaaactggcgatgcggcgcaaatagtcattggagccgggatcaacatggcaatgcgccgtgttgaagagagtgtcgttaatcaggggtggatcacgctgcaggaagcggggatcaatctcgatcgtaatacgttggcggccatgctaatacgtgaattacgtgctgcgttggaactcttcgaacaagaaggattggcaccttatctgtcgcgctgggaaaagctggataattttattaatcgcccagtgaaacttatcattggtgataaagaaatatttggcatttcacgcggaatagacaaacagggggctttattacttgagcaggatggaataataaaaccctggatgggcggtgaaatatccctgcgtagtgcagaaaaataagaaaggggagtattcgctcccctgcaaattatttgcgtagtctgacctcttctaccgcatgattagcacttttcgtcaggattaaactggcgcgctcacgagtaggtagaatattttgctttaagttcagccagttgatctctttccacaatgtcatggcagtcttaatcgcttcttctttagttaatttcgcgtagttatgaaaataggaatccgggtcggtaaaagccccttcgcggaatttcagaaaacggttgatataccatgtctgaagtaagtcttccggtgcatcaacatatatcgaaaaatcgacaaaatcagaaacaaatacatgatgtggatcgtgtggataatccatcccgctctgtaagacatttaacccttcaagaattaaaatatcaggctgaacaaccgttttatctccatccgggatcacatcataaataagatgtgagtaaacaggtgctgtaacgtttggcacgccggatttgagatcggaaacaaacttcaccaggcgatgcatatcatacgattccgggaagcctttcttcttcatcagaccacgttctttcagaacctgattagggtgaaggaagccatctgtagtgatcagttcaacacgacgatgttccggccaacggcttaatagcgcctgcaatacacgggcggttgtacttttccccaccgcgacactgccagcaatactgataatgtaaggaatgcgttgcccgttggtaccaagaaactgttccagaactgcctgacggcgcagattcgagcttatatagaagttcagcaaacgtgacaaaggtaaatagatctcggcaacttcttctaacgagagatcttcattaatacctttgagacgggcgatctcatcttccgataacgtcataggtacggaatcacgcagagctgcccactggttgcggtcaaactgtaggtaaggcgtcattaacgtttgctcttttatactcataagcatgtttctggcggtcatagctctatcggcaaagcgatatttgccatggcgcgtcacagttctgttgaatgggttaatgggcaggagggtaacaccagatggggaggaataataagaaaaaatctctgccaggaagctatcgttgaaaagcaatgtgacagatattccatctgataaaaagaattatggtttagcaggagcgcattgttgagcacaatgatgttgaaaaagtgtgctaatctgccctccgttcggctgtttcttcatcgtgtcgcataaaatgtgaccaataaaacaaattatgcaattttttagttgcatgaactcgcatgtctccatagaatgcgcgctacttgatgccgacttagctcagtaggtagagcaactgacttgtaatcagtaggtcaccagttcgattccggtagtcggcaccatcaagtccggtggggttcccgagcggccaaagggagcagactgtaaatctgccgtcacagacttcgaaggttcgaatccttcccccaccaccaatttcggccacgcgatggcgtagcccgagacgataagttcgcttaccggctcgaataaagagagcttctctcgatattcagtgcagaatgaaaatcaggtagccgagttccaggatgcgggcatcgtataatggctattacctcagccttccaagctgatgatgcgggttcgattcccgctgcccgctccaagatgtgctgatatagctcagttggtagagcgcacccttggtaagggtgaggtcggcagttcgaatctgcctatcagcaccacttcttttctcctccctgttttttccttctgtttattgcattcaacaagtcgggcatgttgcctggttgatgtggtgatatcaccgatttatccgtgtcttagagggacaatcgatgtctaaagaaaagtttgaacgtacaaaaccgcacgttaacgtcggtactatcggccacgttgaccatggtaaaacaacgctgaccgctgcaatcactaccgtactggctaaaacctacggcggtgctgctcgcgcattcgaccagatcgataacgcgccggaagaaaaagctcgtggtatcaccatcaacacttctcacgttgaatacgacaccccgacccgtcactacgcacacgtagactgcccggggcacgccgactatgttaaaaacatgatcaccggtgctgcgcagatggacggcgcgatcctggtagttgctgcgactgacggcccgatgccgcagactcgtgagcacatcctgctgggtcgtcaggtaggcgttccgtacatcatcgtgttcctgaacaaatgcgacatggttgatgacgaagagctgctggaactggttgaaatggaagttcgtgaacttctgtctcagtacgacttcccgggcgacgacactccgatcgttcgtggttctgctctgaaagcgctggaaggcgacgcagagtgggaagcgaaaatcctggaactggctggcttcctggattcttacattccggaaccagagcgtgcgattgacaagccgttcctgctgccgatcgaagacgtattctccatctccggtcgtggtaccgttgttaccggtcgtgtagaacgcggtatcatcaaagttggtgaagaagttgaaatcgttggtatcaaagagactcagaagtctacctgtactggcgttgaaatgttccgcaaactgctggacgaaggccgtgctggtgagaacgtaggtgttctgctgcgtggtatcaaacgtgaagaaatcgaacgtggtcaggtactggctaagccgggcaccatcaagccgcacaccaagttcgaatctgaagtgtacattctgtccaaagatgaaggcggccgtcatactccgttcttcaaaggctaccgtccgcagttctacttccgtactactgacgtgactggtaccatcgaactgccggaaggcgtagagatggtaatgccgggcgacaacatcaaaatggttgttaccctgatccacccgatcgcgatggacgacggtctgcgtttcgcaatccgtgaaggcggccgtaccgttggcgcgggcgttgtagcaaaagttctgagctaattgccgataacatttgacgcaatgcgcactaaaagggcatcatttgatgccctttttgcacgctttcgtaccagaacctggctcatcagtgattttctttgtcataatcattgctgagacaggctctgttgagggcgtataatccgaaaagctaatacgcgtttcgatttggtttgcctcgcgatcgcggggtgaaaatgtttgtagaaaacttctgacaggttggtttatgagtgcgaataccgaagctcaaggaagcgggcgcggcctggaagcgatgaagtgggtcgttgtggtggcattgctcctggtggcgattgtcggcaactatctttatcgcgacattatgctgccgctgcgtgcgctggccgtagtaattctgattgctgcagcgggtggtgtcgcgctgttaacgacaaaaggtaaagctaccgttgcttttgcccgtgaagcgcgtaccgaagtccgtaaggtcatttggccgactcgccaggaaacattgcacaccacgctgattgtggctgcggttaccgcagtaatgtcactgatcctgtggggactggatggtattctggttcgcctggtatcctttatcactggcctgaggttctgagatgtctgaagctcctaaaaagcgctggtacgtcgttcaggcgttttccggttttgaaggccgcgtagcaacgtcgctgcgtgagcatatcaaattacacaacatggaagatttgtttggtgaagtcatggtaccaaccgaagaagtggttgaaatccgtggcggtcagcgtcgcaaaagcgaacgtaaattcttccctggctacgtcctcgttcagatggtgatgaacgacgcgagctggcacctggtgcgcagcgtaccgcgtgtgatgggcttcatcggcggtacttccgatcgtcctgcgccaatcagcgataaagaagtcgatgcgattatgaaccgcctgcagcaggttggtgataagccgcgtccgaaaacgctgtttgaaccgggtgaaatggtccgtgttaatgatggtccgttcgctgacttcaacggtgttgttgaagaagtggattacgagaaatctcgtctgaaagtgtctgtttctatcttcggtcgtgcgaccccggtagagctggacttcagccaggttgaaaaagcctaacccagcgatcaaaaaagcggcgatttaatcgttgcacaaggcgtgagattggaatacaatttcgcgccttttgtttttatgggccttgcccgtaaaacgattttttatatcacggggagcctctcagaggcgttattacccaacttgaggaatttataatggctaagaaagtacaagcctatgtcaagctgcaggttgcagctggtatggctaacccgagtccgccagtaggtccggctctgggtcagcagggcgtaaacatcatggaattctgcaaagcgttcaacgcaaaaactgattccatcgaaaaaggtctgccgattccggtagtaatcaccgtttacgctgaccgttctttcactttcgttaccaagaccccgccggcagcagttctgctgaaaaaagcggctggtatcaagtctggttccggtaagccgaacaaagacaaagtgggtaaaatttcccgcgctcagctgcaggaaatcgcgcagaccaaagctgccgacatgactggtgccgacattgaagcgatgactcgctccatcgaaggtactgcacgttccatgggcctggtagtggaggactaagaaatggctaaactgaccaagcgcatgcgtgttatccgcgagaaagttgatgcaaccaaacagtacgacatcaacgaagctatcgcactgctgaaagagctggcgactgctaaattcgtagaaagcgtggacgtagctgttaacctcggcatcgacgctcgtaaatctgaccagaacgtacgtggtgcaactgtactgccgcacggtactggccgttccgttcgcgtagccgtatttacccaaggtgcaaacgctgaagctgctaaagctgcaggcgcagaactggtaggtatggaagatctggctgaccagatcaagaaaggcgaaatgaactttgacgttgttattgcttctccggatgcaatgcgcgttgttggccagctgggccaggttctgggtccgcgcggcctgatgccaaacccgaaagtgggtactgtaacaccgaacgttgctgaagcggttaaaaacgctaaagctggccaggttcgttaccgtaacgacaaaaacggcatcatccacaccaccatcggtaaagtggactttgacgctgacaaactgaaagaaaacctggaagctctgctggttgcgctgaaaaaagcaaaaccgactcaggcgaaaggcgtgtacatcaagaaagttagcatctccaccaccatgggtgcaggtgttgcagttgaccaggctggcctgagcgcttctgtaaactaatgcctttacgtgggcggtgattttgtctacaatcttacccccacgtataatgcttaatgcagacgtatatccgagatattcgggttgtggcaaggcggcaactgagtgagtcgccaggagcatagctaactatgtgactggtgcgaatgaaggaagccaacgccgtcacaagctgaatagcgacggatagaaaagatttgttcgttggagcctggcctatccaggcctccgtcgaagaccgcaggagtttcgcaagaaacttaatcccctgcgtagacggtgacagaacgctaagattattcttttatattctggcttgtttctgctcaccgtaattaagacgctctctccgtttggaggagtgaagtgagttccagagattttctctggcaaacatccaggagcaaagctaatggctttaaatcttcaagacaaacaagcgattgttgctgaagtcagcgaagtagccaaaggcgcgctgtctgcagtagttgcggattcccgtggcgtaactgtagataaaatgactgaactgcgtaaagcaggtcgcgaagctggcgtatacatgcgtgttgttcgtaacaccctgctgcgccgtgctgttgaaggtactccgttcgagtgcctgaaagacgcgtttgttggtccgaccctgattgcatactctatggaacacccgggcgctgctgctcgtctgttcaaagagttcgcgaaagcgaatgcaaaatttgaggtcaaagccgctgcctttgaaggtgagctgatcccggcgtctcagatcgaccgcctggcaactctgccgacctacgaagaagcaattgcacgcctgatggcaaccatgaaagaagcttcggctggcaaactggttcgtactctggctgctgtacgcgatgcgaaagaagctgcttaatcgcagttatctttttaacgcattcgcttacgtataaacttattctgatattcaggaacaatttaaatgtctatcactaaagatcaaatcattgaagcagttgcagctatgtctgtaatggacgttgtagaactgatctctgcaatggaagaaaaattcggtgtttccgctgctgctgctgtagctgtagctgctggcccggttgaagctgctgaagaaaaaactgaattcgacgtaattctgaaagctgctggcgctaacaaagttgctgttatcaaagcagtacgtggcgcaactggcctgggtctgaaagaagctaaagacctggtagaatctgcaccggctgctctgaaagaaggcgtgagcaaagacgacgcagaagcactgaaaaaagctctggaagaagctggcgctgaagttgaagttaaataagccaacccttccggttgcagcctgagaaatcaggctgatggctggtgactttttagtcaccagcctttttgcgctgtaaggcgccagtagcgtttcacactgtttgactactgctgtgcctttcaatgcttgtttctatcgacgacttaatatactgcgacaggacgtccgttctgtgtaaatcgcaatgaaatggtttaagcgtgatagcaacaggcattgcggaaagtgttccattttccggtcaacaaaatagtgttgcacaaactgtccgctcaatggacagatgggtcgacttgtcagcgagctgaggaaccctatggtttactcctataccgagaaaaaacgtattcgtaaggattttggtaaacgtccacaagttctggatgtaccttatctcctttctatccagcttgactcgtttcagaaatttatcgagcaagatcctgaagggcagtatggtctggaagctgctttccgttccgtattcccgattcagagctacagcggtaattccgagctgcaatacgtcagctaccgccttggcgaaccggtgtttgacgtccaggaatgtcaaatccgtggcgtgacctattccgcaccgctgcgcgttaaactgcgtctggtgatctatgagcgcgaagcgccggaaggcaccgtaaaagacattaaagaacaagaagtctacatgggcgaaattccgctcatgacagacaacggtacctttgttatcaacggtactgagcgtgttatcgtttcccagctgcaccgtagtccgggcgtcttctttgactccgacaaaggtaaaacccactcttcgggtaaagtgctgtataacgcgcgtatcatcccttaccgtggttcctggctggacttcgaattcgatccgaaggacaacctgttcgtacgtatcgaccgtcgccgtaaactgcctgcgaccatcattctgcgcgccctgaactacaccacagagcagatcctcgacctgttctttgaaaaagttatctttgaaatccgtgataacaagctgcagatggaactggtgccggaacgcctgcgtggtgaaaccgcatcttttgacatcgaagctaacggtaaagtgtacgtagaaaaaggccgccgtatcactgcgcgccacattcgccagctggaaaaagacgacgtcaaactgatcgaagtcccggttgagtacatcgcaggtaaagtggttgctaaagactatattgatgagtctaccggcgagctgatctgcgcagcgaacatggagctgagcctggatctgctggctaagctgagccagtctggtcacaagcgtatcgaaacgctgttcaccaacgatctggatcacggcccatatatctctgaaaccttacgtgtcgacccaactaacgaccgtctgagcgcactggtagaaatctaccgcatgatgcgccctggcgagccgccgactcgtgaagcagctgaaagcctgttcgagaacctgttcttctccgaagaccgttatgacttgtctgcggttggtcgtatgaagttcaaccgttctctgctgcgcgaagaaatcgaaggttccggtatcctgagcaaagacgacatcattgatgttatgaaaaagctcatcgatatccgtaacggtaaaggcgaagtcgatgatatcgaccacctcggcaaccgtcgtatccgttccgttggcgaaatggcggaaaaccagttccgcgttggcctggtacgtgtagagcgtgcggtgaaagagcgtctgtctctgggcgatctggataccctgatgccacaggatatgatcaacgccaagccgatttccgcagcagtgaaagagttcttcggttccagccagctgtctcagtttatggaccagaacaacccgctgtctgagattacgcacaaacgtcgtatctccgcactcggcccaggcggtctgacccgtgaacgtgcaggcttcgaagttcgagacgtacacccgactcactacggtcgcgtatgtccaatcgaaacccctgaaggtccgaacatcggtctgatcaactctctgtccgtgtacgcacagactaacgaatacggcttccttgagactccgtatcgtaaagtgaccgacggtgttgtaactgacgaaattcactacctgtctgctatcgaagaaggcaactacgttatcgcccaggcgaactccaacttggatgaagaaggccacttcgtagaagacctggtaacttgccgtagcaaaggcgaatccagcttgttcagccgcgaccaggttgactacatggacgtatccacccagcaggtggtatccgtcggtgcgtccctgatcccgttcctggaacacgatgacgccaaccgtgcattgatgggtgcgaacatgcaacgtcaggccgttccgactctgcgcgctgataagccgctggttggtactggtatggaacgtgctgttgccgttgactccggtgtaactgcggtagctaaacgtggtggtgtcgttcagtacgtggatgcttcccgtatcgttatcaaagttaacgaagacgagatgtatccgggtgaagcaggtatcgacatctacaacctgaccaaatacacccgttctaaccagaacacctgtatcaaccagatgccgtgtgtgtctctgggtgaaccggttgaacgtggcgacgtgctggcagacggtccgtccaccgacctcggtgaactggcgcttggtcagaacatgcgcgtagcgttcatgccgtggaatggttacaacttcgaagactccatcctcgtatccgagcgtgttgttcaggaagaccgtttcaccaccatccacattcaggaactggcgtgtgtgtcccgtgacaccaagctgggtccggaagagatcaccgctgacatcccgaacgtgggtgaagctgcgctctccaaactggatgaatccggtatcgtttacattggtgcggaagtgaccggtggcgacattctggttggtaaggtaacgccgaaaggtgaaactcagctgaccccagaagaaaaactgctgcgtgcgatcttcggtgagaaagcctctgacgttaaagactcttctctgcgcgtaccaaacggtgtatccggtacggttatcgacgttcaggtctttactcgcgatggcgtagaaaaagacaaacgtgcgctggaaatcgaagaaatgcagctcaaacaggcgaagaaagacctgtctgaagaactgcagatcctcgaagcgggtctgttcagccgtatccgtgctgtgctggtagccggtggcgttgaagctgagaagctcgacaaactgccgcgcgatcgctggctggagctgggcctgacagacgaagagaaacaaaatcagctggaacagctggctgagcagtatgacgaactgaaacacgagttcgagaagaaactcgaagcgaaacgccgcaaaatcacccagggcgacgatctggcaccgggcgtgctgaagattgttaaggtatatctggcggttaaacgccgtatccagcctggtgacaagatggcaggtcgtcacggtaacaagggtgtaatttctaagatcaacccgatcgaagatatgccttacgatgaaaacggtacgccggtagacatcgtactgaacccgctgggcgtaccgtctcgtatgaacatcggtcagatcctcgaaacccacctgggtatggctgcgaaaggtatcggcgacaagatcaacgccatgctgaaacagcagcaagaagtcgcgaaactgcgcgaattcatccagcgtgcgtacgatctgggcgctgacgttcgtcagaaagttgacctgagtaccttcagcgatgaagaagttatgcgtctggctgaaaacctgcgcaaaggtatgccaatcgcaacgccggtgttcgacggtgcgaaagaagcagaaattaaagagctgctgaaacttggcgacctgccgacttccggtcagatccgcctgtacgatggtcgcactggtgaacagttcgagcgtccggtaaccgttggttacatgtacatgctgaaactgaaccacctggtcgacgacaagatgcacgcgcgttccaccggttcttacagcctggttactcagcagccgctgggtggtaaggcacagttcggtggtcagcgtttcggggagatggaagtgtgggcgctggaagcatacggcgcagcatacaccctgcaggaaatgctcaccgttaagtctgatgacgtgaacggtcgtaccaagatgtataaaaacatcgtggacggcaaccatcagatggagccgggcatgccagaatccttcaacgtattgttgaaagagattcgttcgctgggtatcaacatcgaactggaagacgagtaattctcgctcaaacaggtcactgctgtcgggttaaaacccggcagcggattgtgctaactccgacgggagcaaatccgtgaaagatttattaaagtttctgaaagcgcagactaaaaccgaagagtttgatgcgatcaaaattgctctggcttcgccagacatgatccgttcatggtctttcggtgaagttaaaaagccggaaaccatcaactaccgtacgttcaaaccagaacgtgacggccttttctgcgcccgtatctttgggccggtaaaagattacgagtgcctgtgcggtaagtacaagcgcctgaaacaccgtggcgtcatctgtgagaagtgcggcgttgaagtgacccagactaaagtacgccgtgagcgtatgggccacatcgaactggcttccccgactgcgcacatctggttcctgaaatcgctgccgtcccgtatcggtctgctgctcgatatgccgctgcgcgatatcgaacgcgtactgtactttgaatcctatgtggttatcgaaggcggtatgaccaacctggaacgtcagcagatcctgactgaagagcagtatctggacgcgctggaagagttcggtgacgaattcgacgcgaagatgggggcggaagcaatccaggctctgctgaagagcatggatctggagcaagagtgcgaacagctgcgtgaagagctgaacgaaaccaactccgaaaccaagcgtaaaaagctgaccaagcgtatcaaactgctggaagcgttcgttcagtctggtaacaaaccagagtggatgatcctgaccgttctgccggtactgccgccagatctgcgtccgctggttccgctggatggtggtcgtttcgcgacttctgacctgaacgatctgtatcgtcgcgtcattaaccgtaacaaccgtctgaaacgtctgctggatctggctgcgccggacatcatcgtacgtaacgaaaaacgtatgctgcaggaagcggtagacgccctgctggataacggtcgtcgcggtcgtgcgatcaccggttctaacaagcgtcctctgaaatctttggccgacatgatcaaaggtaaacagggtcgtttccgtcagaacctgctcggtaagcgtgttgactactccggtcgttctgtaatcaccgtaggtccatacctgcgtctgcatcagtgcggtctgccgaagaaaatggcactggagctgttcaaaccgttcatctacggcaagctggaactgcgtggtcttgctaccaccattaaagctgcgaagaaaatggttgagcgcgaagaagctgtcgtttgggatatcctggacgaagttatccgcgaacacccggtactgctgaaccgtgcaccgactctgcaccgtctgggtatccaggcatttgaaccggtactgatcgaaggtaaagctatccagctgcacccgctggtttgtgcggcatataacgccgacttcgatggtgaccagatggctgttcacgtaccgctgacgctggaagcccagctggaagcgcgtgcgctgatgatgtctaccaacaacatcctgtccccggcgaacggcgaaccaatcatcgttccgtctcaggacgttgtactgggtctgtactacatgacccgtgactgtgttaacgccaaaggcgaaggcatggtgctgactggcccgaaagaagcagaacgtctgtatcgctctggtctggcttctctgcatgcgcgcgttaaagtgcgtatcaccgagtatgaaaaagatgctaacggtgaattagtagcgaaaaccagcctgaaagacacgactgttggccgtgccattctgtggatgattgtaccgaaaggtctgccttactccatcgtcaaccaggcgctgggtaaaaaagcaatctccaaaatgctgaacacctgctaccgcattctcggtctgaaaccgaccgttatttttgcggaccagatcatgtacaccggcttcgcctatgcagcgcgttctggtgcatctgttggtatcgatgacatggtcatcccggagaagaaacacgaaatcatctccgaggcagaagcagaagttgctgaaattcaggagcagttccagtctggtctggtaactgcgggcgaacgctacaacaaagttatcgatatctgggctgcggcgaacgatcgtgtatccaaagcgatgatggataacctgcaaactgaaaccgtgattaaccgtgacggtcaggaagagaagcaggtttccttcaacagcatctacatgatggccgactccggtgcgcgtggttctgcggcacagattcgtcagcttgctggtatgcgtggtctgatggcgaagccggatggctccatcatcgaaacgccaatcaccgcgaacttccgtgaaggtctgaacgtactccagtacttcatctccacccacggtgctcgtaaaggtctggcggataccgcactgaaaactgcgaactccggttacctgactcgtcgtctggttgacgtggcgcaggacctggtggttaccgaagacgattgtggtacccatgaaggtatcatgatgactccggttatcgagggtggtgacgttaaagagccgctgcgcgatcgcgtactgggtcgtgtaactgctgaagacgttctgaagccgggtactgctgatatcctcgttccgcgcaacacgctgctgcacgaacagtggtgtgacctgctggaagagaactctgtcgacgcggttaaagtacgttctgttgtatcttgtgacaccgactttggtgtatgtgcgcactgctacggtcgtgacctggcgcgtggccacatcatcaacaagggtgaagcaatcggtgttatcgcggcacagtccatcggtgaaccgggtacacagctgaccatgcgtacgttccacatcggtggtgcggcatctcgtgcggctgctgaatccagcatccaagtgaaaaacaaaggtagcatcaagctcagcaacgtgaagtcggttgtgaactccagcggtaaactggttatcacttcccgtaatactgaactgaaactgatcgacgaattcggtcgtactaaagaaagctacaaagtaccttacggtgcggtactggcgaaaggcgatggcgaacaggttgctggcggcgaaaccgttgcaaactgggacccgcacaccatgccggttatcaccgaagtaagcggttttgtacgctttactgacatgatcgacggccagaccattacgcgtcagaccgacgaactgaccggtctgtcttcgctggtggttctggattccgcagaacgtaccgcaggtggtaaagatctgcgtccggcactgaaaatcgttgatgctcagggtaacgacgttctgatcccaggtaccgatatgccagcgcagtacttcctgccgggtaaagcgattgttcagctggaagatggcgtacagatcagctctggtgacaccctggcgcgtattccgcaggaatccggcggtaccaaggacatcaccggtggtctgccgcgcgttgcggacctgttcgaagcacgtcgtccgaaagagccggcaatcctggctgaaatcagcggtatcgtttccttcggtaaagaaaccaaaggtaaacgtcgtctggttatcaccccggtagacggtagcgatccgtacgaagagatgattccgaaatggcgtcagctcaacgtgttcgaaggtgaacgtgtagaacgtggtgacgtaatttccgacggtccggaagcgccgcacgacattctgcgtctgcgtggtgttcatgctgttactcgttacatcgttaacgaagtacaggacgtataccgtctgcagggcgttaagattaacgataaacacatcgaagttatcgttcgtcagatgctgcgtaaagctaccatcgttaacgcgggtagctccgacttcctggaaggcgaacaggttgaatactctcgcgtcaagatcgcaaaccgcgaactggaagcgaacggcaaagtgggtgcaacttactcccgcgatctgctgggtatcaccaaagcgtctctggcaaccgagtccttcatctccgcggcatcgttccaggagaccactcgcgtgctgaccgaagcagccgttgcgggcaaacgcgacgaactgcgcggcctgaaagagaacgttatcgtgggtcgtctgatcccggcaggtaccggttacgcgtaccaccaggatcgtatgcgtcgccgtgctgcgggtgaagctccggctgcaccgcaggtgactgcagaagacgcatctgccagcctggcagaactgctgaacgcaggtctgggcggttctgataacgagtaatcgttaatccgcaaataacgtaaaaacccgcttcggcgggtttttttatggggggagtttagggaaagagcatttgtcagaatatttaaggaatttctgaatactcataatcaatgtagagatgactaatatcctgaaactgactgaactaattgagtcaaactcggcaaggattcgatactattcctgtgtaactttcttaaggaacgagaatgaaacaggaagtggaaaagtggcgaccttttggacatccggatggtgatattcgtgatttatcatttcttgatgctcatcaggctgtctacgttcagcatcatgagggcaaagagcctttagagtatcgcttttgggttacctactctcttcactgcttcacaaaagattatgaacatcagacgaacgaagaaaaacaatcgttaatgtaccacgcgcctaaagaatctcgtcccttctgccagcaccgttataacttagcgcgcacacacttaaaaagaactattttggcgctgccagaaagcaacgttattcatgccgggtatggtagctatgccgtgattgaggtggacttagacggaggagataaggcattttactttgttgcgttcagggctttcagggaaaagaaaaaactccgtttgcatgtaactagcgcttatcccatttctgaaaaacagaaaggtaaatcagtgaaatttttcaccattgcctacaacttattgagaaataagcagcttcctcagccctcaaaataacaaaacccaccttaaggtgggtttcgccagagaattatctctggtattcagaacgccattaccggactttgccttgaccttgcgataatcgcaggttgcgggatgtctgaatttcttcagtctgctgcatcctggaagatgagaacatgtgttcttattttcgtctctatcatagttgagtatttactctcttacaatcagatctctttcattgctcaacaggcgatggcttcagactttgcattacggaatttttaagaaaggcagggcgaaacgaggaagaagcttttcgccctggacaacattcctgctgacggcactaccataaaaaaacacaacgctttcaacaaccttgcgtttttcatcttccgtagcggctcggaataaatttacgttcttacattccgtctcatagtctttgcgaggcgcgtcccagatagctgtcccagtctttccataccggctgcaaaccctgagcggttaacgcggcagcaaccgcttccggtctgcgatcgtcgtgcggtgagaactgttccaactcggggtgattatcggcatagccacctggctgcgttttcgagaaggcgctgacgttattgatcgccagcggaataacgcgatcgcgaaaccacggtgattcccgcgtggagagtgacagttcaatctccggtgcaagcagtcggaaggcgcagatggtttgcactaactggcgttcatccataatcgacgcaggctcaatgccgccagtacacgggcgcaggcgcggaaaggagacagagtaacggctttgccagtaatgctgttgcagccatagcaaatgttcggcaaccatatagctgtcaacgcgccagttgtcggaaaggccaattagcgcgccgaggcctatcttatcaatccccgcacgccccagccgatccggcgtttccagccgccagaagaagtcctgttttttgcctttcagatgatggcgggcataagtcgcctcgtgatatgtctcctgataaaccatcacgccatccagaccaagttgctttaactcggcgtattccgtctccgccagcggttgcacttccatctgtagtgaagagaactgttcacgaagggcagggagatgacgacgaaagtaatccatccccactttcgcctgatgttcaccagtgactaacagcagatgttcaaagcccatctcccgtatagcggcactttccctggcaatatccgcttcatccagcgttttgcgcttgatgcgattactcatggaaaatccacagtacgtgcagtcgttagcgcaaagattggaaagataaagcgggacgtagaaactaactgtgttgccaaatcgctgacgggtcagacgctgcgcccgttgggccagttgttccagatagccactggcggcaggcgataacagcgccatcatgtcgtcgcgggtgagttgcgaggcatttagcgcccgctctacgtcagcagccgttttgccgttgatacgcaggcggatgtcgtcccagtccagttgtcgccagcgatcgctgaaggttttcatgccgatgcctccagaaatccggtcagcgggctggtggcatgagcaaaataactgcggctgcccggtccggactgacgtgccagtaggcctgcttctaccgccagacgaaatgccttcgccatgttgacgggatcgtccgcgacggcaatcgccgtattcactaacaccgcgtcggcccccatttccagcgcctgcgcggcatggctgggaacgccgatgccagcatcgacaaccaccggcactgtggcctgctggataataatctccagcatggcgcgggtttccagtccctgattcgagccaatcggcgcgccgagcggcatcaccgctgcacagccgacttcttccagacgtttacacaataccggatcggccccgcagtaaggcagcacgacaaatccctgttgtaccagcgtttcggcggctttcagggtttcgatgggatcgggcaacagccagcgggcgtcagggtgaatctctaattttaaccagtttgtgcctaacgcttcacgagccagatgggcggcgaaaatggcttcttccgctgttttcgccccggatgtatttggcagcagggtcacacccgccgcgataagcggttcgaggatagcgtcgttgtgctggcgcaagtcgacacgtttcatcgccagtgtcaccagctggctgccggaagcgcggatcgcctccaccatcagttgtgaagaagcgaatttccctgtgccggtaaacagatgtgaatcaaacgttttgtccgcaatacgtaacatttcaaccccctgcaataacctgaaaaagcaggatctggtcgccatcctgcacgatatgttgcgcccactgctcacgcgggacgatttgctgattaatcgccagagccgcgcccgcttgtcgttggtcgagttgctccagtagttcgtgaacagtttgcccggcggcgcactgcatcgcttgatcgttaaacaggatctgcattgcttcctccgcataccgggcaaccactggcgcggcgcaacgccaggctgcgccactggctcgatttaccgtcgaacagtcggagttctcccgcaggtgtctctataccgcttaataacttaatggcttccagtgcctgcaaagtgcccataaccccgaccaccgggccaaccacgcccgccgtgcggcagttgcgttctggctcctggttatctggccacaggcagcggtaacacccctgctcccagggcggcgtcagtaccatcaactgaccgccaaatccgaccgcgctggcggtgataagcggcgtgttgagtgccacgcaggcggcattaatctcctggcgagtcgccatattgtcggtacagtcgagcaccacatcggcccgtgcaaccgcatcttttaacgcctcacccgttaaccgttgttgtaatgctgtcagttgaatgtcgggattcaactgtgtcagtcgctgttggctgacctgcgatttcgggcgatcgatatcttcagtggtaaagaggatttgtcgttgcagattgcttaaatgcacatcgtcgtcatctgccagtaccagcgtcccgacgccagcgcccgccaggtacagcgcagcaggtgtacccagcccgcccagaccgataatcagcacctggctgtcgagcagtttttgctgcccgtccagagcgatatcgtcgagcaggatttggcggctataacgcataaagtcacggtcattcatcgccaactcctgcaatttccagcaactgtgccgttgccaaacgccagtctgcggcttgagtaatggcgctgacgacggcgatactgccgacacccgttgctatcaccgcaggcgcgcgtgccagactgataccgccaatcgccacggtgggataatccgccagtcgctcaacatgccgtgccagctgttccagcccctgcggtgcagaaggcatctgtttggtttgcgtcgggaacacatgtcccagcgcgatataagaggggcgtgctgccagcgcgacgtcgatttccatatcgtcatgtgtcgaaacgcccagccgcaggcctgccgcgcggatggcattgagatcggtggcttgcaaatcttcctgccccaaatggacgccatacgcctgatgcttgatcgccagccgccagtaatcgttgataaacaatcgcgcgttatagcggcggcccagcgcaattgccgccacgacatcggcttccacctcttcatcgcgccgatctttgatgcgtagctggagagtacgtacgcctgcatccaacagacgttcgatccactgtacgctgtccaccaccgggtacagtcctgaacgaaaaggtacaggaggaaaatcaggctgatacatcacgcttcctccttacgcaggtagatttctccgcctctggcacggaagttctccgacatatccgccattcccatttcaatagtttgcgtggcggcgtaatcacgcacttcctggctgattttcatcgagcagaatttcggcccacacatggagcaaaaatgggcgactttacctgactcttgcggcagggtttcatcgtgataagcgcgggcggtaaacgggtcgagggccagattaaactggtcttcccagcgaaattcgaagcgggctttcgacatggcgttatcgcgaatttgcgcgcccggatgccctttcgccaggtcagcggcgtgggcagcaatcttataggtgataagcccctgcttaacatcttctttattgggcagacccagatgctcttttggcgttacgtaacagagcatcgcgcagccaaaccagccaatcatcgccgcaccaatccccgacgtgaagtggtcatagcccggcgcaatatcggtagttagcggccccagagtgtaaaacggcgcttcgtggcagtgctctaactcctcggtcatattgcggcggatcatctgcatcggcacgtggcctgggccttcaatcatcacctgcacgtcatattcccaggcaattttggtcagttcgcccagcgtatgcagctcggcaaactgcgcttcatcgttggcgtcctgaatagaaccggggcgcagaccgtcgcccagcgacagcgaaacgtcataagcggcacagatttcacaaatttcgcggaagtgttgatagaggaaattttcctgatgatgggagaggcaccatttcgccataatcgaaccgccgcgagagacgataccggtcaggcgtttcgcggtcatcggcacatagcgcagcagtacgcccgcatggatagtgaagtaatccacaccttgctcggcctgttccagcagcgtgtcgcggaacgcttcccaggtaagatcttcggcgatcccgttaaccttctccagcgcctggtagatcggcactgtaccgatcggcaccgggctgttacgcaaaatccactcgcgggtttcgtgaatatagcgaccggtggagagatccatcaccgtatccgctccccagcgcgtggaccataccagcttttccacttcttcttcgatggaagaggtgaccgccgagttgccgatattggcgttaacttttaccaggaaattgcgaccaataatcatcggctccgattccggatgattaatgttggccgggataatcgcacgtccggcagcaacttcatcacggacaaattccgcagtgatattttccggcagatgtgcgccaaagctcattcccggatgctggtggcgtaaaacctcgctacggatgcgctcgcggcccatattctcgcggatggcgatgaattccatttccggcgtgatgatgccctggcgggcgtagtgcagttgggtgacacggcgtcctgctttggcgcgttttggtgttagtacgccgctaaaacgcagttcgtcgaggccatcatctgccagccgcgctttagtgtaatcggaactgcgcacggtaagttcttcggtatcgccgcgcgcatcgatccacggctggcgtagttttgccagcccttgctgcacgttaatggcaatctgcggatcaccatacgggccggaggtgtcgtagaccggaatcgcttcgttttcttcgtactgcggctgttctttgctaccgccaattagcgtcgggctaagctggatctcacgcatcggcacgcgcacgccggggtgtgtgccagtgatataaatgcgttttgagttgggaaaggcggtgccttccagggtgtcgataaaatgttgggcccgggcgcgttgttcgcggcgggtcagttttgttgcagacatagctcattccaaaaagttaaggacgtggcttgtcagacgacggatgaagcaagagacgatcgccgcaggggcgatgcgatagcagattaactcttgttcccttcgcaggtattagcctgatcaggttccgcggatcccgaataaacggtctcagccagttaaggcactccgacaagaaattagccccgcaaatggggcattgaatgtaaattacgcgttaacagcgcagaactcaagcaggatgtttgacgcgggcggcgtcaagcaccagcagaatcagcttatcttccagcacaaagcgcgcttccagcgcctcgccgatgtcagataaaacctgttgaaactcaaggtaattatcatgatcgatggcggtttccagactggaatcgtagtaatccataatctgttgagtattggcttcgagttgcggccaaatcttcgcggcgcgcgcgagttgcccgttgccttccagcttatgaagaatgcgctcataaatactgaaatgtccggcagacaagtaatcgaccaggctctgacaaaaatcatcaagggctttttcgtttagcctcatgtacgattctttgccaggcttaatgccaaccagattgtagtaagccacgagcagatgcttacgtacatgtagccagcgatcaaccagtttgttacttcctctgacgcgctccgtcaggttatcgagctggttaagcatgattgactccgcaagtttgtattcaaaaactgctcagtgagaaatgtaaaaaccatgttaaacatgccagtgatgcaaaggtagtgcaagagctatggatcgtataattgaaaaattagatcacggctggtgggtcgtcagccatgaacaaaaattatggttgccgaagggagaattgccatatggcgaagcggcaaatttcgatcttgtgggtcagcgcgcactacaaatcggcgaatggcagggggaacctgtttggttagtacaacagcagcggcgtcacgatatggggtcggtacgtcaggtcattgatctcgatgttgggctgtttcaactggccggacgaggcgtacaactggcggagttttaccgatcgcataaatactgtggttactgcgggcatgaaatgtatccgagcaaaaccgaatgggcgatgctgtgcagccattgccgtgagcgttactacccgcaaatcgccccctgcattattgttgccatccgtcgcgatgattcgatcctcctcgcccagcatacccgccatcgtaacggtgtccatacagtacttgccggattcgtcgaagtgggcgaaaccctcgagcaggcagtcgcgcgggaagtgatggaagagagcggaattaaagttaaaaacttgcgttacgtgacttctcagccgtggccgtttcctcagtctttaatgaccgcgtttatggcggaatatgacagcggcgacatcgtgatcgacccgaaagaattgctcgaggcgaactggtatcgctatgacgatttgccgttactcccgccgcccggcaccgtagcgcgccgtctgatagaagatacggtggcgatgtgtcgggcagagtatgagtgatgatacactgaccgcctgacgcactaaggaacagccaaaatgaccgaacttaaaaacgatcgttatctgcgggcgctgctgcgccagcccgttgatgtcactccagtatggatgatgcgccaggcgggtcgctatctaccggaatataaagccacgcgcgcccaggcaggcgattttatgtcgctgtgcaaaaacgccgagctggcgtgcgaagtgactttgcaaccgctgcgtcgctacccgctggatgcggcgatcctcttttccgatatcctcaccgtgccggacgcgatggggttagggctctattttgaagccggagaaggtccgcgttttacctcgccagtcacctgcaaagctgacgtcgataaactgccaattccggacccggaagatgaactgggttacgtgatgaacgcggtgcgtaccattcgtcgcgaactgaaaggcgaagtgccgctgattggtttttccggcagcccgtggacgctggcgacctacatggtggaaggcggcagcagcaaagccttcaccgtgatcaaaaaaatgatgtatgccgatccgcaggcgctgcacgctctgctcgataaactggcgaaaagcgtcactttgtatctgaatgcgcagattaaagccggtgctcaggcagtgatgattttcgacacctggggcggcgtgcttaccgggcgcgattatcaacagttctcgctctattacatgcataaaattgttgatggtttactgcgtgaaaacgacggtcgccgcgtaccggtcacgctgtttaccaaaggcggcggacagtggctggaagccatggcagaaaccggttgcgatgcgctgggcctcgactggacaacggacatcgccgatgcgcgccgccgtgtgggcaataaagtcgcgttgcagggtaatatggatccgtcgatgctgtacgcgccgcctgcccgcattgaagaagaagtagcgactatacttgcaggtttcggtcacggcgaaggtcatgtctttaaccttggtcacggcattcatcaggatgtgccgccagaacatgctggcgtgttcgtggaggcagtgcatcgactgtctgaacagtatcaccgctaaggagtgattatggatctcgcgtcattacgcgctcaacaaatcgaactggcttcttctgtgatccgcgaggatcgactcgataaagatccaccggatctgatcgccggagccgatgtcgggtttgagcagggcggagaagtgacgcgagcggcgatggtgctgctgaaatatccctcgcttgagctggtcgagtataaagttgcccgcatcgccaccaccatgccttacattccaggttttctttccttccgcgaatatcctgcgctgctggcagcgtgggagatgctgtcgcaaaagccggatttagtgtttgtcgatggtcatgggatctcgcatcctcgccgtcttggcgtcgccagccattttggcttattggtggatgtgccgaccattggcgtggcgaaaaaacggctctgcggtaaattcgaaccgctctccagcgaaccgggcgcgctggccccactgatggataaaggcgagcagctggcctgggtctggcgcagcaaagcgcgctgtaacccgttgtttatcgctaccggccatcgggtcagcgtggacagcgcgctggcgtgggtacaacgctgcatgaaaggctatcgtctgccggagccaacgcgctgggcggacgcggtggcctcggaacgtccggcgttcgtgcgctatacagcaaatcagccctaattcaggtaaactgcggataatttccgtatttgagaactcaacatgttacaaaacccaattcatctgcgtctggagcgcctggaaagctggcagcatgtcactttcatggcttgcttatgcgaacgcatgtaccccaattacgccatgttctgccagcaaaccggttttggtgatgggcaaatttaccgtcgcattctcgatctcatctgggaaacgctgaccgttaaagacgcaaaagtaaatttcgacagccaactggagaaatttgaagaagcgattccttcagccgacgatttcgatctgtacggcgtttatccggcaatcgatgcctgcgtggcgttaagtgaactggtccattcgcgtttgagtggtgaaacgctcgaacacgcggtggaagtgagtaagacctccatcacgaccgttgcgatgctggaaatgactcaggctggtcgcgaaatgagcgatgaagagcttaaagaaaacccagctgtagagcaagaatgggacattcagtgggaaatattccgacttttagctgagtgcgaagaacgcgatatcgagctgataaaaggccttagggcagacctgcgtgaggcgggtgagagcaatattggtataatttttcagcaataagaccagaaaacgtgatttaacgcctgatttgtcgtacctggagtcttccctttcgccccccgtctggtctacatttggggggcgaaaaaaagtggctatcggtgcgtgtatgcaggagagtgctattctggcatttccgtcgcactcgatgcttagcaagcgataaacacattgtaaggataacttatgaacaagactcaactgattgatgtaattgcagagaaagcagaactgtccaaaacccaggctaaagctgctctggagtccactctggctgcaattactgagtctctgaaagaaggcgatgctgtacaactggttggtttcggtaccttcaaagtgaaccaccgcgctgagcgtactggccgcaacccgcagaccggtaaagaaatcaaaattgccgcagctaacgtaccggcatttgtttctggcaaggcactgaaagacgcagttaagtaagattgcgtggcagtgaacagttttaacgaaggggtggtttcaccccttttgtctttctggcgtcgatcattgatgctggctggcgctctgcttctcactgcctgtagtcataactcttcacttcctccctttaccgccagtggatttgctgaagaccagggcgcggtacgcatctggcgaaaagacagcggcgataatgtgcatctgcttgccgtgtttagcccgtggcgcagtggcgataccacgacgcgagagtatcgctggcagggcgataacctcacgctcatcaatatcaatgtttacagcaaaccgccggtgaatattcgcgcgcgttttgacgatcgcggtgatctgagctttatgcaacgtgaatccgatggggaaaagcagcagctttctaacgaccaaatcgatttataccgttatcgtgctgatcagatccgccagattagcgatgccttacgtcaggggagagtcgtgctgcgccaggggcgctggcatgcgatggaacagaccgtgaccacctgcgaagggcaaaccattaaacctgatttagattcgcaggcgatagcgcatatcgagcgccgccagagccgctcttctgttgatgtcagcgtggcatggctggaagcgcccgaaggttcgcaattactgttagtggcaaactctgatttctgtcgctggcaacccaacgagaaaacgttctgatttaccagtggcccatacccatatgaccgccaccaccgcagccgccgtagcccatgcccattccggctccgcgcggaatacccgcttcagccatcgcgatatctcgtttcacccgtaactcatctaacgactgacgcaaattctccatctctttggcgaccgcgttaattttgctgctatccggtgggttcgcggctaacagggcattgtattcataacgcttcgtcaccagttgctgttgcagtgcgctgctttgagcgtaaaagtcattatggattttctgccacgctgtctgttgttcgctggtcaaaggcgcggcattttgctgccacataccgtgtccgccgtgagcaaatgcagatgtcgatcccatcgccattgctgaaagcgccatcattaccagggcaattttcgtgttccgtttcatggttaatcctccagtggttgtcttacttcgggtattgcatcttccgtgccaacgatgaaacgctgatatgacgggtaatctggcatgataaacgagtaaaaatgactcgcctgctgcgggtagcgagtcatttttactcattgaaacttaagcctttgtgttacagcgcagggtaagcgctgataaaagatggcatgatttctgctgtcagaaagggatgagcaggcaaagaagaagatgcgttttatgcaacgttctaaagactccttagctaaatggttaagcgcgatcctccccgtggtcattgttgggctggtgggattgtttgcggtaactgtgattcgtgattatgggcgggcaagcgaggcagaccgccaggcattactggaaaaaggtaatgtgcttatccgcgctctggagtcgggaagccgcgtagggatggggatgcgaatgcaccatgtacagcaacaggcgcttctggaagagatggcgggacagccgggagtgttgtggttcgcagtcaccgatgcgcagggcatcattattcttcatagcgaccccgataaggtcgggcgtgcgctctattcgccggatgaaatgcagaaattaaagccagaggaaaactcccgctggcggctgcttgggaaaacggaaactacgcctgcacttgaggtctatcgtttgttccagccaatgtcagcgccctggcggcatggaatgcacaatatgccgcgctgtaacggcaaagctgtgccacaagtagatgcacaacaggctatttttatcgccgttgatgccagtgatctggttgcaacccagagtggggaaaagcgcaataccctgattatcctcttcgccctggcgacggtcttgctggcaagcgtattgtcattcttctggtatcgccgctatctgcgctcgcgccagcttctacaagatgaaatgaagcgcaaagagaagctggtggcgctggggcatcttgcggcaggcgttgcccacgaaatccgtaacccactttcctcgattaaaggactggcgaaatactttgccgagcgcgcgcctgcagggggagaagcgcatcaactggcgcaggtgatggcgaaagaggccgaccgtttaaaccgcgtggtaagcgagttgctggaactggttaagccaacgcatctggctttgcaggcggtggatctcaacacgctgattaaccactcattacagctggtaagtcaggatgcaaacagccgggagatccagttacgctttaccgccaacgacacattaccggaaattcaggccgacccggacaggctgactcaggtcctgttgaatctctatctcaatgctattcaggcgattggtcagcatggcgtgattagcgtgacggccagcgaaagcggcgcgggcgtgaaaatcagcgttaccgacagcggtaagggaattgcggcagatcagcttgatgccatcttcactccgtacttcaccactaaagccgaaggcaccggattggggctggcggtcgtgcataatattgttgaacaacacggtggtacaattcaggtcgcaagccaggagggaaaaggctcaacgttcaccctctggcttccggtcaatattacgcgtaaggacccacaaggatgacgcacgataatatcgatattctggtggtggatgatgacattagccactgcactattttgcaggctttactgcgcggctggggctataacgtcgcgctggcgaacagcgggcgacaggcgttggagcaggtgcgggaacaggtttttgatcttgtgctttgcgatgtgcgaatggcggagatggacggcatcgccacgctgaaagagatcaaagcgttaaacccggcaattccggtgctgattatgactgcgtactccagcgtcgagacggcggtagaggcactgaaaactggggcgctggattatctcatcaagccgctggatttcgataacctacaggcgacgctggaaaaagcgctcgcgcatacgcacagtattgatgctgaaacacctgcggtgactgccagccagttcggtatggtcggtaaaagcccggcgatgcaacacctgctcagtgaaatcgccctcgtcgcgccatcggaagccacggtactgatccacggcgattccggcaccggtaaagagctggtcgccagggcgattcacgccagtagcgcacgtagcgaaaaaccgctggtaacgctcaactgtgcggcactcaacgaatccttgctggaatctgaattgttcggtcacgaaaaaggggcgtttactggagccgataaacgccgggaagggcgctttgttgaggcggacggcggcacgctgtttctcgatgaaattggcgatatctcgccgatgatgcaggtgcgtctgctgcgtgcgattcaggagcgcgaagttcagcgtgtcggtagcaaccagattatctcggttgatgtccggctgattgcggcgacccatcgcgatcttgccgcagaggtgaatgccgggcgttttcgccaggatctctactatcgcctgaatgtggtggcgattgaagtaccatcgctgcggcaacggcgggaagatatccctctgctggctggccattttctgcagcgctttgccgagcgtaatcgcaaggcggtaaaaggttttacgccccaggcgatggatctgttgattcattacgactggccgggaaatattcgtgagctggaaaacgcggtggaacgggcagtggtgctgctgaccggggaatatatttccgaacgcgagctgccgctggcgattgccagtacgccgatcccgctgggacaaagtcaggatattcagccgttggtggaagtggaaaaagaggtgattctggcggcgctggagaaaacgggcggcaacaaaaccgaagccgcccgtcagttagggatcacgcgcaaaacgctattggcaaaactgtcgcgttagttctgctcgcgttcgatagcgcgccagccgatatctttccggcagaagcagtcgtcccagtggatatcggtcattaaggcataggcgcgtttctgcgcttctgccacggtatgacccagcgcggtgacgcacagtacgcgcccgccgttggtcactacctgctcgtcatccgccagttttgtgcccgcgtggaacactttgccgcctgccacttcttccagcggcaggccgtggatcacgtcaccggtgcggtaatcacccggatatccacccgcagccatcaccacgccgagagaagcgcgttcatcccactcggacgttttctcgtccagtttgctttcacaggccgccaggcagagctcaaccagatcggacttcatgcgcagcataatcggctgggtttccggatcgccaaagcggcagttaaattcaataaccttcggattgccctgtttgtcgatcatcaggcccgcgtagagaaaaccggtgtaggtgttgccttccgccgccatgcctttcacggttggccagataatacgttccatggtgcgctgatgaacgtcatcggttactaccggcgcgggggagtaagcgcccatcccgccggtgtttggtccggtatctttatcgcctacgcgtttgtgatcctggctggtagccatcggcagcacatgctcgccgtccaccatcacgataaagctcgcttcttcgccatcgaggaactcttcgataacgatgcgatgacccgcgtcgccaaaagcgttgcccgccagcatatcgtgaacagccgcttccgcttcttccagcgtcatcgccacgataacgcctttcccggcagccagaccgtccgctttaatgacgattggcgcgcctttctcacgcagatacgccagcgcaggttctacctcggtgaagttctggtattccgccgtagggatcttatggcgggccaggaaatctttggtaaacgcttttgagccttccagttgggccgcacctgcggttgggccgaagattttcagcccggcggcgcggaaggtatcgaccacgcctttcaccagcggcgcttccgggccgacgatggtcagatcaatcttttcgttttgtgcgaaatccaacagcgccgggatatcggtcacgccaatagcaacgttttgcagcgcgggttccagtgcagtgcctgcattacccggagcaacaaaaacagtctcaaccagcggcgactgggccgctttccaggccagcgcgtgctcgcgcccgccgttaccaatcactaatactttcatctattgctccattaatggcggaagtggcgcatgtcggtgaagagcatcgcaataccgtgctcgtcggcggcggcaatcacttcgtcatcacggatagaaccgccaggctggattacgcaggtcacgcccgcagcggcggcggcatcaataccgtcgcggaacgggaagaacgcgtcagaagccatcgaggaacctttcacttccaggccttcatcggccgctttaataccggcgatttttgcggagtacacgcggctcatctggcccgcgccaatgccgatagtcatattgtttttggcatagacgatagcgttggatttcacaaacttcgccaccttccagcagaacagcgcatcacgcagttcctgttcgctcggctgacgtttggtcaccacgcgcagttcttccgcaccgaccatccccaggtcacgatcctgaaccagcagaccgccgttcacgcgtttgaaatcgaggcccggaacacgctcgccccactgaccgcaggtcagaacgcgtacgttctgtttggcggcggtgattttcagggcttcttcgctggcggacggcgcaataatcacttcgacaaactgacgagaaatgatggcctgtgcggtttccgcatccagctcgcggttaaaggcaatgatgccgccgaatgcggaggttgggtcggttttgtacgcgcgatcgtaagcatcaagaatggaattgccgatagccacgccgcaagggttggcgtgcttcacaatcacacatgccggctcggcgaactctttcacgcactccagcgccgcatcggtatcggcgatgttgttataagagagggctttaccctgaacctgggttgcggtagcaacggaggcttctttcacattctcttctatatagaaggcagcctgctggtggctgttctcgccgtaacgcatatccagcttcttaatgaagttcaggttcagcgtgcgtgggaagcgaccggcggcttctttgctttcaccgtggtaagccggaaccatgctgccgaagtagttggcaatcatgctgtcgtaggcggcagtgtgttcgaaggctttgatggcgaggtcgaaacgggttgcaagcgtcagcgatccttcgttgtcatccatctctttaataatggcgtcatagtcgctgctcttcaccacgattgcgacatctttatggttcttggcggcggagcgcaccatcgttgggccgccgatatcgatgttctcaaccgcatcttccagcgagcaaccttcacgggccacggtctgggcgaacggatacaggttaacaaccaccatatcgataggctggatctgatgttcttccataatggcatcgtcctggccgcgacggcccagaatgccaccatgtactttcggatgcagggtcttcacgcgtccatccatcatctccgggaaaccggtgtaatcggaaacttcggttaccggcagacctttttctgctaacagacgggcagtgccccctgtagacagcagctccacaccgcgtgcggaaagtgcctgggcgaattcgacgataccggctttgtcagaaacactgagcagagcgcggcggactggacgacgttgttgcatggtaaatcccctggatttgactattacagagagcgttagctgaatttttcgcgaaaaactcagctaacgcccctaacggggcatccttatttttcgcccgcattgtaacgaaaacgtttgcgcaacgctcgcgaatttttctctttcaatggtgatcacaattttgactgtggttaccgtgggcaaaatacagaaattacattgatgattgtggataactctgtgcgtaaaaaggtataaagcgggcttttgctggggaatgcagcagtcagtcatttttctgcaatttttctattgcggcctgcggagaactccctataatgcgcctccatcgacacggcggatgtgaatcacttcacacaaacagccggttcggttgaagagaaaaatcctgaaattcagggttgactctgaaagaggaaagcgtaatatacgccacctcgcgacagtgcgctaaagcgcgtcgcaactgctctttaacaatttatcagacaatctgtgtgggcactcgaagatacggattcttaacgtcgcaagacgaaaaatgaataccaagtctcaagagtgaacacgtaattcattacgaagtttaattctttgagcatcaaacttttaaattgaagagtttgatcatggctcagattgaacgctggcggcaggcctaacacatgcaagtcgaacggtaacaggaagaagcttgcttctttgctgacgagtggcggacgggtgagtaatgtctgggaaactgcctgatggagggggataactactggaaacggtagctaataccgcataacgtcgcaagaccaaagagggggaccttcgggcctcttgccatcggatgtgcccagatgggattagctagtaggtggggtaacggctcacctaggcgacgatccctagctggtctgagaggatgaccagccacactggaactgagacacggtccagactcctacgggaggcagcagtggggaatattgcacaatgggcgcaagcctgatgcagccatgccgcgtgtatgaagaaggccttcgggttgtaaagtactttcagcggggaggaagggagtaaagttaatacctttgctcattgacgttacccgcagaagaagcaccggctaactccgtgccagcagccgcggtaatacggagggtgcaagcgttaatcggaattactgggcgtaaagcgcacgcaggcggtttgttaagtcagatgtgaaatccccgggctcaacctgggaactgcatctgatactggcaagcttgagtctcgtagaggggggtagaattccaggtgtagcggtgaaatgcgtagagatctggaggaataccggtggcgaaggcggccccctggacgaagactgacgctcaggtgcgaaagcgtggggagcaaacaggattagataccctggtagtccacgccgtaaacgatgtcgacttggaggttgtgcccttgaggcgtggcttccggagctaacgcgttaagtcgaccgcctggggagtacggccgcaaggttaaaactcaaatgaattgacgggggcccgcacaagcggtggagcatgtggtttaattcgatgcaacgcgaagaaccttacctggtcttgacatccacggaagttttcagagatgagaatgtgccttcgggaaccgtgagacaggtgctgcatggctgtcgtcagctcgtgttgtgaaatgttgggttaagtcccgcaacgagcgcaacccttatcctttgttgccagcggtccggccgggaactcaaaggagactgccagtgataaactggaggaaggtggggatgacgtcaagtcatcatggcccttacgaccagggctacacacgtgctacaatggcgcatacaaagagaagcgacctcgcgagagcaagcggacctcataaagtgcgtcgtagtccggattggagtctgcaactcgactccatgaagtcggaatcgctagtaatcgtggatcagaatgccacggtgaatacgttcccgggccttgtacacaccgcccgtcacaccatgggagtgggttgcaaaagaagtaggtagcttaaccttcgggagggcgcttaccactttgtgattcatgactggggtgaagtcgtaacaaggtaaccgtaggggaacctgcggttggatcacctccttaccttaaagaagcgttctttgcagtgctcacacagattgtctgatagaaagtgaaaagcaaggcgtcttgcgaagcagactgatacgtccccttcgtctagaggcccaggacaccgccctttcacggcggtaacaggggttcgaatcccctaggggacgccacttgctggtttgtgagtgaaagtcacctgccttaatatctcaaaactcatcttcgggtgatgtttgagatatttgctctttaaaaatctggatcaagctgaaaattgaaacactgaacaacgaaagttgttcgtgagtctctcaaattttcgcaacacgatgatgaatcgtaagaaacatcttcgggttgtgaggttaagcgactaagcgtacacggtggatgccctggcagtcagaggcgatgaaggacgtgctaatctgcgataagcgtcggtaaggtgatatgaaccgttataaccggcgatttccgaatggggaaacccagtgtgtttcgacacactatcattaactgaatccataggttaatgaggcgaaccgggggaactgaaacatctaagtaccccgaggaaaagaaatcaaccgagattcccccagtagcggcgagcgaacggggagcagcccagagcctgaatcagtgtgtgtgttagtggaagcgtctggaaaggcgcgcgatacagggtgacagccccgtacacaaaaatgcacatgctgtgagctcgatgagtagggcgggacacgtggtatcctgtctgaatatggggggaccatcctccaaggctaaatactcctgactgaccgatagtgaaccagtaccgtgagggaaaggcgaaaagaaccccggcgaggggagtgaaaaagaacctgaaaccgtgtacgtacaagcagtgggagcacgcttaggcgtgtgactgcgtaccttttgtataatgggtcagcgacttatattctgtagcaaggttaaccgaataggggagccgaagggaaaccgagtcttaactgggcgttaagttgcagggtatagacccgaaacccggtgatctagccatgggcaggttgaaggttgggtaacactaactggaggaccgaaccgactaatgttgaaaaattagcggatgacttgtggctgggggtgaaaggccaatcaaaccgggagatagctggttctccccgaaagctatttaggtagcgcctcgtgaattcatctccgggggtagagcactgtttcggcaagggggtcatcccgacttaccaacccgatgcaaactgcgaataccggagaatgttatcacgggagacacacggcgggtgctaacgtccgtcgtgaagagggaaacaacccagaccgccagctaaggtcccaaagtcatggttaagtgggaaacgatgtgggaaggcccagacagccaggatgttggcttagaagcagccatcatttaaagaaagcgtaatagctcactggtcgagtcggcctgcgcggaagatgtaacggggctaaaccatgcaccgaagctgcggcagcgacgcttatgcgttgttgggtaggggagcgttctgtaagcctgcgaaggtgtgctgtgaggcatgctggaggtatcagaagtgcgaatgctgacataagtaacgataaagcgggtgaaaagcccgctcgccggaagaccaagggttcctgtccaacgttaatcggggcagggtgagtcgacccctaaggcgaggccgaaaggcgtagtcgatgggaaacaggttaatattcctgtacttggtgttactgcgaaggggggacggagaaggctatgttggccgggcgacggttgtcccggtttaagcgtgtaggctggttttccaggcaaatccggaaaatcaaggctgaggcgtgatgacgaggcactacggtgctgaagcaacaaatgccctgcttccaggaaaagcctctaagcatcaggtaacatcaaatcgtaccccaaaccgacacaggtggtcaggtagagaataccaaggcgcttgagagaactcgggtgaaggaactaggcaaaatggtgccgtaacttcgggagaaggcacgctgatatgtaggtgaggtccctcgcggatggagctgaaatcagtcgaagataccagctggctgcaactgtttattaaaaacacagcactgtgcaaacacgaaagtggacgtatacggtgtgacgcctgcccggtgccggaaggttaattgatggggttagcgcaagcgaagctcttgatcgaagccccggtaaacggcggccgtaactataacggtcctaaggtagcgaaattccttgtcgggtaagttccgacctgcacgaatggcgtaatgatggccaggctgtctccacccgagactcagtgaaattgaactcgctgtgaagatgcagtgtacccgcggcaagacggaaagaccccgtgaacctttactatagcttgacactgaacattgagccttgatgtgtaggataggtgggaggctttgaagtgtggacgccagtctgcatggagccgaccttgaaataccaccctttaatgtttgatgttctaacgttgacccgtaatccgggttgcggacagtgtctggtgggtagtttgactggggcggtctcctcctaaagagtaacggaggagcacgaaggttggctaatcctggtcggacatcaggaggttagtgcaatggcataagccagcttgactgcgagcgtgacggcgcgagcaggtgcgaaagcaggtcatagtgatccggtggttctgaatggaagggccatcgctcaacggataaaaggtactccggggataacaggctgataccgcccaagagttcatatcgacggcggtgtttggcacctcgatgtcggctcatcacatcctggggctgaagtaggtcccaagggtatggctgttcgccatttaaagtggtacgcgagctgggtttagaacgtcgtgagacagttcggtccctatctgccgtgggcgctggagaactgaggggggctgctcctagtacgagaggaccggagtggacgcatcactggtgttcgggttgtcatgccaatggcactgcccggtagctaaatgcggaagagataagtgctgaaagcatctaagcacgaaacttgccccgagatgagttctccctgactccttgagagtcctgaaggaacgttgaagacgacgacgttgataggccgggtgtgtaagcgcagcgatgcgttgagctaaccggtactaatgaaccgtgaggcttaaccttacaacgccgaaggtgttttggcggattgagagaagattttcagcctgatacagattaaatcagaacgcagaagcggtctgataaaacagaatttgcctggcggcagtagcgcggtggtcccacctgaccccatgccgaactcagaagtgaaacgccgtagcgccgatggtagtgtggggtctccccatgcgagagtagggaactgccaggcatcaaattagaaaaaccccggtccataaggccggggttttttgcatatcaattatttgcatgatgaagggaatctcatgtcagttctgtatatccaaattcgtcgtaatcaaattactgttcgcgatcttgaaagcaaacgtgaagtgtcaggagacgctgccttcagtaaccagcgcctgttaatcgccaatttctttgttgcagaaaaagttctgcaagatcttgttctgcaactccacccacgttcaacctggcattcttttttgccagcaaaacgtatggatattgttgtgagcgcactggaaatgaatgagggcggtttgtcacaggttgaggaacgcattctccatgaagtggtcgctggggcaacgttaatgaaatatcgccagttccacatccatgcgcaatcagcggtactcagtgatagtgcggtcatggcaatgcttaagcagaaataatcgtgtcaccattggtgggtactaaacctgaagttcagcccaccgggatgagaaaaaatcgcctacgcccccacatacgccagattcagcaacggatacggtttccccaaatcgtccacctcagagcgtcccgtaaccttaaaacccaccttcttatagaacccaaccgcctgctcattttgctcattaacgttggttgtcagttccggtgccatcgagagcgcatgctccaccagcacccgacctacgccgcagccgcgcacatcaggatcgataaacagcgcatccatatgctgcccacttagcaacataaatccaaccggctgatcccgctcattaaccgcgacccacaacggcgcttccggcaggaaggaacgaactaggtcctccagctcggtccgatactctgctgatagaaaatcgtgagtggcatcgacagaacgacaccaaatcgcaacgagttcctccccttcctcatgccgtgagcggcgaatactaataaccattttctctccttttagtcattcttatattctaacgtagtcttttccttgaaactttctcaccttcaacatgcaggctcgacattggcaaattttctggttatcttcagctatctggatgtctaaacgtataagcgtatgtagtgaggtaatcaggttatgccgattcgtgtgccggacgagctacccgccgtcaatttcttgcgtgaagaaaacgtctttgtgatgacaacttctcgtgcgtctggtcaggaaattcgtccacttaaggttctgatccttaacctgatgccgaagaagattgaaactgaaaatcagtttctgcgcctgctttcaaactcacctttgcaggtcgatattcagctgttgcgcatcgattcccgtgaatcgcgcaacacgcccgcagagcatctgaacaacttctactgtaactttgaagatattcaggatcagaactttgacggtttgattgtaactggtgcgccgctgggcctggtggagtttaatgatgtcgcttactggccgcagatcaaacaggtgctggagtggtcgaaagatcacgtcacctcgacgctgtttgtctgctgggcggtacaggccgcgctcaatatcctctacggcattcctaagcaaactcgcaccgaaaaactctctggcgtttacgagcatcatattctccatcctcatgcgcttctgacgcgtggctttgatgattcattcctggcaccgcattcgcgctatgctgactttccggcagcgttgattcgtgattacaccgatctggaaattctggcagagacggaagaaggggatgcatatctgtttgccagtaaagataagcgcattgcctttgtgacgggccatcccgaatatgatgcgcaaacgctggcgcaggaatttttccgcgatgtggaagccggactagacccggatgtaccgtataactatttcccgcacaatgatccgcaaaatacaccgcgagcgagctggcgtagtcacggtaatttactgtttaccaactggctcaactattacgtctaccagatcacgccatacgatctacggcacatgaatccaacgctggattaatcttctgtgatagtcgatcgttaagcgattcagcaccttacctcaggcaccttcgggtgccttttttatttccgaaacgtacctcagcaggtgaataaattttattcatattgttatcaacaagttatcaagtatttttaattaaaatggaaattgtttttgattttgcattttaaatgagtagtcttagttgtgctgaacgaaaagagcacaacgatccttcgttcacagtggggaagttttcggatccatgacgaggagctgcacgatgactgaacaggcaacaacaaccgatgaactggctttcacaaggccgtatggcgagcaggagaagcaaattcttactgccgaagcggtagaatttctgactgagctggtgacgcattttacgccacaacgcaataaacttctggcagcgcgcattcagcagcagcaagatattgataacggaacgttgcctgattttatttcggaaacagcttccattcgcgatgctgattggaaaattcgcgggattcctgcggacttagaagaccgccgcgtagagataactggcccggtagagcgcaagatggtgatcaacgcgctcaacgccaatgtgaaagtctttatggccgatttcgaagattcactggcaccagactggaacaaagtgatcgacgggcaaattaacctgcgtgatgcggttaacggcaccatcagttacaccaatgaagcaggcaaaatttaccagctcaagcccaatccagcggttttgatttgtcgggtacgcggtctgcacttgccggaaaaacatgtcacctggcgtggtgaggcaatccccggcagcctgtttgattttgcgctctatttcttccacaactatcaggcactgttggcaaagggcagtggtccctatttctatctgccgaaaacccagtcctggcaggaagcggcctggtggagcgaagtcttcagctatgcagaagatcgctttaatctgccgcgcggcaccatcaaggcgacgttgctgattgaaacgctgcccgccgtgttccagatggatgaaatccttcacgcgctgcgtgaccatattgttggtctgaactgcggtcgttgggattacatcttcagctatatcaaaacgttgaaaaactatcccgatcgcgtcctgccagacagacaggcagtgacgatggataaaccattcctgaatgcttactcacgcctgttgattaaaacctgccataaacgcggtgcttttgcgatgggcggcatggcggcgtttattccgagcaaagatgaagagcacaataaccaggtgctcaacaaagtaaaagcggataaatcgctggaagccaataacggtcacgatggcacatggatcgctcacccaggccttgcggacacggcaatggcggtattcaacgacattctcggctcccgtaaaaatcagcttgaagtgatgcgcgaacaagacgcgccgattactgccgatcagctgctggcaccttgtgatggtgaacgcaccgaagaaggtatgcgcgccaacattcgcgtggctgtgcagtacatcgaagcgtggatctctggcaacggctgtgtgccgatttatggcctgatggaagatgcggcgacggctgaaatttcccgtacctcgatctggcagtggatccatcatcaaaaaacgttgagcaatggcaaaccggtgaccaaagccttgttccgccagatgctgggcgaagagatgaaagtcattgccagcgaactgggcgaagaacgtttctcccaggggcgttttgacgatgccgcacgcttgatggaacagatcaccacttccgatgagttaattgatttcctgaccctgccaggctaccgcctgttagcgtaaaccaccacataactatggagcatctgcacatgaaaacccgtacacaacaaattgaagaattacagaaagagtggactcaaccgcgttgggaaggcattactcgcccatacagtgcggaagatgtggtgaaattacgcggttcagtcaatcctgaatgcacgctggcgcaactgggcgcagcgaaaatgtggcgtctgctgcacggtgagtcgaaaaaaggctacatcaacagcctcggcgcactgactggcggtcaggcgctgcaacaggcgaaagcgggtattgaagcagtctatctgtcgggatggcaggtagcggcggacgctaacctggcggccagcatgtatccggatcagtcgctctatccggcaaactcggtgccagctgtggtggagcggatcaacaacaccttccgtcgtgccgatcagatccaatggtccgcgggcattgagccgggcgatccgcgctatgtcgattacttcctgccgatcgttgccgatgcggaagccggttttggcggtgtcctgaatgcctttgaactgatgaaagcgatgattgaagccggtgcagcggcagttcacttcgaagatcagctggcgtcagtgaagaaatgcggtcacatgggcggcaaagttttagtgccaactcaggaagctattcagaaactggtcgcggcgcgtctggcagctgacgtgacgggcgttccaaccctgctggttgcccgtaccgatgctgatgcggcggatctgatcacctccgattgcgacccgtatgacagcgaatttattaccggcgagcgtaccagtgaaggcttcttccgtactcatgcgggcattgagcaagcgatcagccgtggcctggcgtatgcgccatatgctgacctggtctggtgtgaaacctccacgccggatctggaactggcgcgtcgctttgcacaagctatccacgcgaaatatccgggcaaactgctggcttataactgctcgccgtcgttcaactggcagaaaaacctcgacgacaaaactattgccagcttccagcagcagctgtcggatatgggctacaagttccagttcatcaccctggcaggtatccacagcatgtggttcaacatgtttgacctggcaaacgcctatgcccagggcgagggtatgaagcactacgttgagaaagtgcagcagccggaatttgccgccgcgaaagatggctataccttcgtatctcaccagcaggaagtgggtacaggttacttcgataaagtgacgactattattcagggcggcacgtcttcagtcaccgcgctgaccggctccactgaagaatcgcagttctaagcaacaacaaccgttgctgactgtaggccggataaggcgttcacgccgcatccggcaatcggtgcacgatgcctgatgcgacgcttgcgcgtcttatcatgcctacagccgttgccgaacgtaggctggataaggcgtttacgccgcatccggcaattctctgctcctgatgagggcgctaaatgccgcgtggcctggaattattgattgctcaaaccattttgcaaggcttcgatgctcagtatggtcgattcctcgaagtgacctccggtgcgcagcagcgtttcgaacaggccgactggcatgctgtccagcaggcgatgaaaaaccgtatccatctttacgatcatcacgttggtctggtcgtggagcaactgcgctgcattactaacggccaaagtacggacgcggcatttttactacgtgttaaagagcattacacccggctgttgccggattacccgcgcttcgagattgcggagagcttttttaactccgtgtactgtcggttatttgaccaccgctcgcttactcccgagcggctttttatctttagctctcagccagagcgccgctttcgtaccattccccgcccgctggcgaaagactttcaccccgatcacggctgggaatctctactgatgcgcgttatcagcgacctaccgctgcgcctgcgctggcagaataaaagccgtgacatccattacattattcgccatctgacggaaacgctggggacagacaacctcgcggaaagtcatttacaggtggcgaacgaactgttttaccgcaataaagccgcctggctggtaggcaaactgatcacaccttccggcacattgccatttttgctgccgatccaccagacggacgacggcgagttatttattgatacctgcctgacgacgaccgccgaagcgagcattgtttttggctttgcgcgttcttattttatggtttatgcgccgctgcccgcagcgctggtcgagtggctacgggaaattctgccaggtaaaaccaccgctgaattgtatatggctatcggctgccagaagcacgccaaaaccgaaagctaccgcgaatatctcgtttatctacagggctgtaatgagcagttcattgaagcgccgggtattcgtggaatggtgatgttggtgtttacgctgccgggctttgatcgggtattcaaagtcatcaaagacaggttcgcgccgcagaaagagatgtctgccgctcacgttcgtgcctgctatcaactggtgaaagagcacgatcgcgtgggccgaatggcggacacccaggagtttgaaaactttgtgctggagaagcggcatatttccccggcattaatggaattactgcttcaggaagcagcggaaaaaatcaccgatctcggcgaacaaattgtgattcgccatctttatattgagcggcggatggtgccgctcaatatctggctggaacaagtggaaggtcagcagttgcgcgacgccattgaagaatacggtaacgctattcgccagcttgccgctgctaacattttccctggcgacatgctgtttaaaaacttcggtgtcacccgtcacgggcgtgtggttttttatgattacgatgaaatttgctacatgacggaagtgaatttccgcgacatcccgccgccgcgctatccggaagacgaacttgccagcgaaccgtggtacagcgtctcgccgggcgatgttttcccggaagagtttcgccactggctatgcgccgacccgcgtattggtccgctgtttgaagagatgcacgccgacctgttccgcgctgattactggcgcgcactacaaaaccgcatacgtgaagggcatgtggaagatgtttatgcgtatcggcgcaggcaaagatttagcgtacggtatggggagatgcttttttgagtaaagcttccatataatttttctccgcaatgtatcgagggttatccgtaaagccaaagctttcagccatcttatttaatgtattaaggattaattcagcaataacccggtgaccaaattcaaaagccaactcaaaggcagagtatttttgtggggctttgtgttgccaaaaatccataatatcttcagcggtaaatccaaacaggcgtgcatggtcagataaagcaagataaaccgtctctacaacattttgttgtttatgctgtatcgctgaaaacaaaccgggatattcattagaattatttgccaggaggaggggcttcatattttttttatcgaatttaaacgtattaaacagagtgggtaatgcgttaaaaatagtattaataacgttcatgtgtccgcgctgcatggccataaacaaacccgtgtcgcgcgcaagacttttagcggtcagaagatctacaatatcggaagctgaaatgttaatttcctgggctaggctgggcaatgcttcaagaataactttcacgatatcgctatgtccattttgcatcgccagatatagtcctgggcaaccataaaaatcctttgccttcaggagatcgagtacctgttctttagtcaaatgacatgtgcgaattaacaaaggtaacgcgttcaaaacaattttcagcatgtcggcatcaccattcgccataacatggtataaaacatggctggacgttctatttttggcactcaggaatttatacacttgttcgttatctaaatgatgtgttgcggccagtttaggtaaggcgttcagaatcgaggttacaacatttttatccttacgtgatatcgctaaaaataatccagaaaaaccatttttatcttttgcctccagaatatgcatgagattttttttcgagagtaatccttcatatcctgtttctgacaatgaattgaaaatagtctcaacgatatccgcattaccataatttatagccaaatataaacctggcaggttaatactattataggcagtcaacatttctgttctatgtagttctggcattttctggagttgaatcatcagttgcgtaagttggtgattctgaccaattgccattagcaaattcatcgttgcaggtgataatggaggggttatttcatccacagatccttttaacatcaatagctgttctttcggaagtgctggaattattgcaacagattgattaataacatgatcatttgaccatttcaggaggctataatctacattcataaaatccatcagagaatagtgtttaatattctctttgctttcgctcataattcttattttatcgttagttacattaggatcataaaccgaaaccacgtaatgggtacatccttcagttgtgttctttattcttagccggaccgtcaaagcatggttatccaccagtaatatggctgccataacactgatgccatttgattccatcttgtcaaaatatgctttcataactagcccgaaatcaccgcaggcagcaacgcaacgcccctcaggacggctggaaaccaacgccaaagtctggtttttgcattttttgttgaagtgcgtgagaaatttttcagctgaagagtaatcatcttgatggggtttgtaatcaacattctgataaatatcattaatatattgtgcagcaatgtgtcggcatactatacggttttggggtcgccccggaaaataacattgaccattaagtttaattcttgggaattctttttcttttctatctgattttaggtttaattcttgtttatcaagagtgtctgagcgttgaggtaaaatttccattaggtatttttcaaatattggggcaatggtttgagtaagtgtcgtgttttcgtttttattaattatcgtaatttctttcttatcagcttgtaagacggacgtggaaaatttaatgacaaaatccttgttgctaaagatatgacgaccattttgtctacagttctctgagaagctttttaatagaggcgtcgccagctccttgccagaaaatttatcctcgagttctttataaaacaattcactcagggtttggtgttcatttgtctgggctgtattattaatatttgcagagaaagaactacgaggaatacgagtaatcatttaaatatctcattgtttattgatgtcttgaattttaactatcagaacagtgaaaaaatttaatatgattacaactaaagaaatatcataaatcgctcaatctcataatgcagccgtaaaagtttcggtggaatgagatcttgcgattttgttaataattaagtggtttgatgtttaaaaataatgctgagttaataaaagtgtgtgaagtgtatgacattaagttattttggcgtcaatgcgattaacagacacccttattctattgccactcaggtatgatgggcagaatattgcctctgcccgccagaaaaagtcagcgcattccaccgtacgccagcgtcacttccttcgccgctttaatcaccatcgcgccaaactcggtcacgcggtcatcggtaatacgtgaaatcggtccggaaatagaaattgcggcaaacggttcacggtgctcatcgaaaatacacgctgcaaggcaacgtagccccagtgcatgttcctcatcgtcaaatgaataaccccgtttgcgcgtttgggcgagatcttcttttaaatgcacaggagacaccagcgttgcgtgggtataggcatgtaaccctttgcggtgcagcagcttcgtcacctgttcttcgctcagttgggctaaaaaggctttacccgcaccggaagcgtgcatcggcaatttaccgccgataggcgcggacattcgcatcagatgcgtacactgtacctggtcgataataatcgcttcgtgatcgctttgatcaagcaccgccatattgaccgtttcgccagactcttccattagattgcgcaggatagggtgaacaatcgctaacaaattacggctctggagaaagctgctgccgaccataaaggcatgtgcgccgattgcccaatgtcccagttcgccaacctgacgcacgaaaccctgctgttgcatcgtggttagcaggcggtgggtcgtggaattgggtaacccggcttgttgcgccagttccgtgagtgccacactgccattggattcggcaatccactccagtaatttcaggccacgcgttaaagactgaacctgtccagtcgctggtgcggtggcaacggcgggttttctgccgcgtttcgcgggaatgggtgcgaccatgacagtctcttttttctgtatcgtggaaatcattttcatttttattgttagctaatgcaatagttactgaactgatccgatgagttaatgttgaacaaatctcatgttgcgtggtggtcgcttttaccacagatgcgtttatgccagtatggtttgttgaatttttattaaatctgggttgagcgtgtcgggagcaagtgtgagcagcaaagtggaacaactgcgtgcgcagttaaatgaacgtattctggtgctggacggcggtatgggcaccatgatccagagttatcgactgaacgaagccgattttcgtggtgaacgctttgccgactggccatgcgacctcaaaggcaacaacgacctgctggtactcagtaaaccggaagtgatcgccgctatccacaacgcctactttgaagcgggcgcggatatcatcgaaaccaacaccttcaactccacgaccattgcgatggcggattaccagatggaatccctgtcggcggaaatcaactttgcggcggcgaaactggcgcgagcttgtgctgacgagtggaccgcgcgcacgccagagaaaccgcgctacgttgccggtgttctcggcccgaccaaccgcacggcgtctatttctccggacgtcaacgatccggcatttcgtaatatcacttttgacgggctggtggcggcttatcgagagtccaccaaagcgctggtggaaggtggcgcggatctgatcctgattgaaaccgttttcgacacccttaacgccaaagcggcggtatttgcggtgaaaacggagtttgaagcgctgggcgttgagctgccgattatgatctccggcaccatcaccgacgcctccgggcgcacgctctccgggcagaccaccgaagcattttacaactcattgcgccacgccgaagctctgacctttggcctgaactgtgcgctggggcccgatgaactgcgccagtacgtgcaggagctgtcacggattgcggaatgctacgtcaccgcgcacccgaacgccgggctacccaacgcctttggtgagtacgatctcgacgccgacacgatggcaaaacagatacgtgaatgggcgcaagcgggttttctcaatatcgtcggcggctgctgtggcaccacgccacaacatattgcagcgatgagtcgtgcagtagaaggattagcgccgcgcaaactgccggaaattcccgtagcctgccgtttgtccggcctggagccgctgaacattggcgaagatagcctgtttgtgaacgtgggtgaacgcaccaacgtcaccggttccgctaagttcaagcgcctgatcaaagaagagaaatacagcgaggcgctggatgtcgcgcgtcaacaggtggaaaacggcgcgcagattatcgatatcaacatggatgaagggatgctcgatgccgaagcggcgatggtgcgttttctcaatctgattgccggtgaaccggatatcgctcgcgtgccgattatgatcgactcctcaaaatgggacgtcattgaaaaaggtctgaagtgtatccagggcaaaggcattgttaactctatctcgatgaaagagggcgtcgatgcctttatccatcacgcgaaattgttgcgtcgctacggtgcggcagtggtggtaatggcctttgacgaacagggacaggccgatactcgcgcacggaaaatcgagatttgccgtcgggcgtacaaaatcctcaccgaagaggttggcttcccgccagaagatatcatcttcgacccaaacatcttcgcggtcgcaactggcattgaagagcacaacaactacgcgcaggactttatcggcgcgtgtgaagacatcaaacgcgaactgccgcacgcgctgatttccggcggcgtatctaacgtttctttctcgttccgtggcaacgatccggtgcgcgaagccattcacgcagtgttcctctactacgctattcgcaatggcatggatatggggatcgtcaacgccgggcaactggcgatttacgacgacctacccgctgaactgcgcgacgcggtggaagatgtgattcttaatcgtcgcgacgatggcaccgagcgtttactggagcttgccgagaaatatcgcggcagcaaaaccgacgacaccgccaacgcccagcaggcggagtggcgctcgtgggaagtgaataaacgtctggaatactcgctggtcaaaggcattaccgagtttatcgagcaggataccgaagaagcccgccagcaggctacgcgcccgattgaagtgattgaaggcccgttgatggacggcatgaatgtggtcggcgacctgtttggcgaagggaaaatgttcctgccacaggtggtcaaatcggcgcgcgtcatgaaacaggcggtggcctacctcgaaccgtttattgaagccagcaaagagcagggcaaaaccaacggcaagatggtgatcgccaccgtgaagggcgacgtccacgacatcggtaaaaatatcgttggtgtggtgctgcaatgtaacaactacgaaattgtcgatctcggcgttatggtgcctgcggaaaaaattctccgtaccgctaaagaagtgaatgctgatctgattggcctttcggggcttatcacgccgtcgctggacgagatggttaacgtggcgaaagagatggagcgtcagggcttcactattccgttactgattggcggcgcgacgacctcaaaagcgcacacggcggtgaaaatcgagcagaactacagcggcccgacggtgtatgtgcagaatgcctcgcgtaccgttggtgtggtggcggcgctgctttccgatacccagcgtgatgattttgtcgctcgtacccgcaaggagtacgaaaccgtacgtattcagcacgggcgcaagaaaccgcgcacaccaccggtcacgctggaagcggcgcgcgataacgatttcgcttttgactggcaggcttacacgccgccggtggcgcaccgtctcggcgtgcaggaagtcgaagccagcatcgaaacgctgcgtaattacatcgactggacaccgttctttatgacctggtcgctggccgggaagtatccgcgcattctggaagatgaagtggtgggcgttgaggcgcagcggctgtttaaagacgccaacgacatgctggataaattaagcgccgagaaaacgctgaatccgcgtggcgtggtgggcctgttcccggcaaaccgtgtgggcgatgacattgaaatctaccgtgacgaaacgcgtacccatgtgatcaacgtcagccaccatctgcgtcaacagaccgaaaaaacaggcttcgctaactactgtctcgctgacttcgttgcgccgaagctttctggtaaagcagattacatcggcgcatttgccgtgactggcgggctggaagaggacgcactggctgatgcctttgaagcgcagcacgatgattacaacaaaatcatggtgaaagcgcttgccgaccgtttagccgaagcctttgcggagtatctccatgagcgtgtgcgtaaagtctactggggctatgcgccgaacgagaacctcagcaacgaagagctgatccgcgaaaactaccagggcatccgtccggcaccgggctatccggcctgcccggaacatacggaaaaagccaccatctgggagctgctggaagtggaaaaacacactggcatgaaactcacagaatctttcgccatgtggcccggtgcatcggtttcgggttggtacttcagccacccggacagcaagtactacgctgtagcacaaattcagcgcgatcaggttgaagattatgcccgccgtaaaggtatgagcgttaccgaagttgagcgctggctggcaccgaatctggggtatgacgcggactgattcacaaatctgtcacttttccttacaacaaacagggcgctcaatgagtgccctgtctctttattaatatgaaacacttatactggaaacaggctggaataatcttagccggaaaaacgaatgtcaaaaggcacagtaaagatgccagtcagcgtgtttccggtcctttggtcattcaattgcttcaggaacatataacgataaggagaacctgaactcgtgttaacgctgcttcacctgctttctgccgtcgccctgctggtctgggggactcatattgttcgaaccggcgtaatgcgcgtcttcggcgcgcgtttgcgtactgtccttagccggagcgtcgaaaaaaagccgctcgccttttgcgcggggatcggcgttaccgcactggtacagagcagtaatgccaccaccatgctggtgacctcgtttgtcgctcaggatctggtagccctcgcaccggctctggtcattgtgctgggtgcagatgtcgggacggcgctaatggcgcgtattctcaccttcgacttatcctggctgtcaccgttacttatttttatcggcgtgatttttttcctcggacgcaaacagtcacgcgccgggcaactgggccgcgtcggtattggtcttgggctgattttgctagcgctggagttgattgtgcaggccgtaacgccgatcacccaggcaaacggcgttcaggtgatctttgcctcgctgaccggcgatattctgctggatgcgctgattggcgcgatgttcgccattatcagctactccagccttgctgctgtactgctgaccgcgactctgaccgccgcaggcattatctccttccccgtggcgctctgtctggtgattggtgctaacctcggttccggtctgctggcaatgctcaacaacagtgccgccaatgccgcagcccgccgtgtcgcgctgggtagtctgctgtttaagctggtgggtagcctgattatcctgccgtttgtccatttgctggcagagacaatggggaagttgtcattgccaaaagcggaactggtgatctatttccacgtcttctacaaccttgtacgttgcctggtcatgctgccatttgttgacccgatggcacggttttgcaaaacgattattcgcgatgaaccggaactggatacccagctacggcctaaacatctggatgtcagcgcgctggatacgcccacgcttgctctggcgaacgccgcgcgcgaaaccctgcgcattggcgacgccatggaacagatgatggaagggttgaataaagtgatgcacggtgagccacggcaggagaaagagctgcgtaagctggcagatgatatcaacgttctctacaccgccattaagctgtatctggcgcggatgccaaaagaagagctggcggaggaagagtcgcgccgctgggcagagatcatcgaaatgtcgctcaaccttgaacaggcctccgatatcgtcgagcgcatgggcagcgaaattgctgacaaatcactggcagcacggcgggcattttcgcttgatgggttgaaggaactggatgcgctctatgagcaattgctcagtaatttaaagctggcaatgtcggtgttcttctctggcgatgtcaccagcgctcgtcgtttgcgtcgcagcaaacatcgttttcgcattcttaatcgccgctattcccacgcccacgtcgatcgcctgcatcagcaaaacgtgcagagcattgaaaccagttcgctacatttaggcttactgggagatatgcagcgcctgaactcgctgttttgttcggtggcttacagtgtgctggaacagccggatgaagatgaaggacgggacgagtattaatattgtgaatcctgtaggcctgataagacgcgtcaagcgtcgcatcaggcactatgaacaagatgccggatcatgcatccggcaattcacttaaaaacggtgaccagcttccagcggaaccgcttcttcaccagccttaaacacataagtggtgttcgggccacccagcgtagcgtgacctttactcactgtgatccagttaccttccggtagaccaataatcgtcagttctggcgcgacgaccagcagttcgcgaatacgctgctcacgggtttcacctttatggccttccggcagcgcgttggtgaagtgcgggttgatttgcagcgggaacagatttagcgcatcgaaaccttgcggatcgacaatcggcatatcgttggtggtacgaatagttgggcaagcaaggttagcgcctgcgctccagccaatatacagagcgccacgtttaaccacgtcagtaattggtgccagcagcccgcgctcgcggcactgtttcagcaactggaaagtattcccgccgccgacaatcacgatctcagcattttcaatcgcggcaacgggatcgacaacgctatgaataccggtgacagaaacacccagcggagcgagaaccgcagccgttttcgctgtgtaatcatcccaggtctgcgttacgccagcgaaagggataaacaccgctgagcggcgaccctgcaactgttcagcaattagcggcagtgcatgttccagccaggctttacccggcagcgtcgagttactcaataaaagcagttccattacttctccggttagtaagaaatcacgggaggcatgctaccactgcgaatttaaccacttactgacatggctcacgatgtcgcacattgcttctggaaagtgatttgagcaggtaacgaattcaagccaatggaaataacaaatagttcgctcatgactattttttatcaacccaaaggtacggtatattccgttttttacaggagaatttatgctgcccgactcatcagtccgtttaaataaatacatcagcgaaagcggaatttgctcacgccgcgaagcggatcgctatatcgagcaaggcaatgtgttccttaatggcaagcgagccaccattggcgatcaggtgaaacccggcgacgttgtgaaagtaaacggtcagttgattgaacctcgggaagccgaagatttggtacttatcgccctgaacaagcccgttggtattgtaagcaccaccgaagatggcgagcgcgataacattgtcgatttcgttaaccacagcaaacgcgtgttcccgattggccgcctggataaagactcccaggggctgattttcctcaccaatcacggcgatctggtgaataagatcctgcgtgctggcaatgatcatgagaaagagtatctggtgacggtcgataaaccgattaccgaggagtttattcgcggcatgagtgcgggggtgccaatcctcgggacagtgaccaaaaagtgcaaagttaaaaaagaagcgccgtttgtcttccgcattaccctggtgcaggggctgaaccgtcagatccggcgcatgtgcgagcatttcggctatgaagtgaaaaagctggaacgcacgcgcatcatgaacgttagcttaagcggcattccgctgggggaatggcgcgatttaaccgacgatgagttaatcgacctctttaagctcattgaaaattcctcttccgaggtaaaacctaaagcgaaggccaaaccgaaaacagcgggcatcaaacgtccagtcgttaagatggaaaaaacggcggaaaaaggcggtcgcccggcgtccaacggtaagcgttttacctcgccggggcgtaaaaagaaggggcgctgattaacgcctcagactgatgaaaacggcccaaaagtgcccggacagtcccctcgccccttcgggaaaagggttagggtgaggggaaaattgtgttcacactgacgagtgaaaatctcaggcgttgattgtggattagcgcctgccgcgcgtcgacgtatttgctgaccagctaaatgacgcttcaggatccggtttataagcctgctttttcttcaactggcgggcttttttcgcttcagcctcacgctcaaccattaatttatcgatgtaatctttcttaatgctgttggtttcggagttggtcaatacgcgaccatgcgcaatccgcgcccgatccagcagtgttttaagttcacgctgctcgcgttcagtcatctctttttgggtaatacgggggagtgccatgatggtgccctcagtgagccagagagttcagtgtacgggaattcgtttgcgagcagaactgataatattcattttgccttctcttaactatttatctctttcgataattaattagagatgcagataaaaaaattaaaggcaattattctccgataaagacgctggttaacagagtacaggctcgtttattgatgagcatagtgacaagaaaatcaatacggcccgaaatatagcttccaggccatacagtatttactcaaacaaattactatgcagtttttgcaccacctgctcggcatcttcgccgggcaccaggaagcacaggttatggctggatgcgccataacaaatcatgcgaatgttgaacggttccagtacgccgaatacctctttgccaacgccgcaggcttttgacaggtcattgccaatcaacgcgaccagcgccagaccttcttccacctccacccgacacagtgcggaaagctccatcagcagagattgcgtcagcaacgtatcgccagtggaggttgaaccggtggtatcaagggttaatgccacgctcacttctgacgtggtgattaagtctaccgaaatattatgccgcgcgaggatgccgaaaacttccgcgaggaaaccgcgagaatgcagcatattcaggctgtgcaaagtgagcagagtctgattgcgacgaagcgccagagcgcggaacagcggcggattttcagttttattgcacaccagcgtaccacctgcgcgtgggtctttgctggagccgacaaagaccgggatatcgctgcgtactgcgggtagcaacgttgccggatgcagtacttttgcaccaaaagttgccatctctgccgcttcggcaaacgcgatttcatcaatgcgttttgctgcggaaactacgcgtggatcggtggtgtagatgcccgggacgtcggtccagatatcaacacgagatgcgtgtaaagcctccgccagcaaggctgccgtataatcgctgcctccacggccaagcgtcgttgtacgacctttattttcgctaccgataaatccctgggtgatcactaagccttcattgagacgtgggagcagctgcagcgcggccagttccgccagcgcggctatatctggctctgcacgaccaaatcggtcgttggtacgcatcactttacgtacatcaaaccactgtgcctgaacatcgcgttcgcgcaggatctcaacaaacagcagggtcgacatcagctcgccgtggctgaccagctcatctgtcagcgccggagacgttgccagcgccgccgcttctgccagaacagtaatgttctccagcagacgttcaatctcttcacggataacgttcgggtaacgcagacgttccagaatggcaaactggatgttgcggatagcgtcgagtttttcgaatcgctcgccaggttccagtccttcagctaaagcgaccagcagattagtgataccagcagaagccgagaggacaactaaacgcacgttggcatcagaaagcacaatatcagcgctgcggttcatggcgtcaaaatcagctacgctggtaccgccaaatttggagacaacaatttcagacataactacctcgtgtcaggggatccattttcagccttggcacaagggaagagcggaagacgggtgggcgcagagcgatacttcgctactattttcacccagaagtgctccaccacttgcgaaacgcccgactgcgaacgcttctggtgacaacccaggggattcagcccctgtagccgatgatgaacgtggccagccgttcaatcacctcggcgatgcaccccctcaggtgttatcacaggactggctcctccaacaccgttacttgggcaacgcgcctcttctggcctgcgctagcgcaggtagtacatttataaataaagggtgagcggggcggttgtcaacgatggggtcatgcggatttttcatccactcctggcggtcagtagttcagctaataaatgcttcactgcgctaagggtttacactcaacattacgctaacggcactaaaaccatcacatttttctgtgactggcgctacaatcttccaaagtcacaattctcaaaatcagaagagtattgctaatgaaaaacatcaatccaacgcagaccgctgcctggcaggcactacagaaacacttcgatgaaatgaaagacgttacgatcgccgatctttttgctaaagacggcgatcgtttttctaagttctccgcaaccttcgacgatcagatgctggtggattactccaaaaaccgcatcactgaagagacgctggcgaaattacaggatctggcgaaagagtgcgatctggcgggcgcgattaagtcgatgttctctggcgagaagatcaaccgcactgaaaaccgcgccgtgctgcacgtagcgctgcgtaaccgtagcaataccccgattttggttgatggcaaagacgtaatgccggaagtcaacgcggtgctggagaagatgaaaaccttctcagaagcgattatttccggtgagtggaaaggttataccggcaaagcaatcactgacgtagtgaacatcgggatcggcggttctgacctcggcccatacatggtgaccgaagctctgcgtccgtacaaaaaccacctgaacatgcactttgtttctaacgtcgatgggactcacatcgcggaagtgctgaaaaaagtaaacccggaaaccacgctgttcttggtagcatctaaaaccttcaccactcaggaaactatgaccaacgcccatagcgcgcgtgactggttcctgaaagcggcaggtgatgaaaaacacgttgcaaaacactttgcggcgctttccaccaatgccaaagccgttggcgagtttggtattgatactgccaacatgttcgagttctgggactgggttggcggccgttactctttgtggtcagcgattggcctgtcgattgttctctccatcggctttgataacttcgttgaactgctttccggcgcacacgcgatggacaagcatttctccaccacgcctgccgagaaaaacctgcctgtactgctggcgctgattggcatctggtacaacaatttctttggtgcggaaactgaagcgattctgccgtatgaccagtatatgcaccgtttcgcggcgtacttccagcagggcaatatggagtccaacggtaagtatgttgaccgtaacggtaacgttgtggattaccagactggcccgattatctggggtgaaccaggcactaacggtcagcacgcgttctaccagctgatccaccagggaaccaaaatggtaccgtgcgatttcatcgctccggctatcacccataacccgctctctgatcatcaccagaaactgctgtctaacttcttcgcccagaccgaagcgctggcgtttggtaaatcccgcgaagtggttgagcaggaatatcgtgatcagggtaaagatccggcaacgcttgactacgtggtgccgttcaaagtattcgaaggtaaccgcccgaccaactccatcctgctgcgtgaaatcactccgttcagcctgggtgcgttgattgcgctgtatgagcacaaaatctttactcagggcgtgatcctgaacatcttcaccttcgaccagtggggcgtggaactgggtaaacagctggcgaaccgtattctgccagagctgaaagatgataaagaaatcagcagccacgatagctcgaccaatggtctgattaaccgctataaagcgtggcgcggttaatcatcgtcgatatgtaggccggataaggcgttcacgccgcatccggcaaccgatgcctgatgcgacgcggtcgcgtcttatcaggcctacaggtcgatgccgatatgtacatcgtattcggcaattaatacatagcacgattgattaaataaccttaataacaatgccgacgttatgtcggcatttttttatcagataaatccccttgtctgtaatttaacggaaatcataccgtgaggttaatcctaaaatagatttttaatcgttgtttatttcggaaaatacgcagattaattgcttttgtttttattttaagtttatgatttttattgttatttaaatataagttgaaacttatatttgatattcattccaattatcctaaaacgccatcgctaattccccgcgccgtaattcgcatgctttagttgtgtatactcgatcccgcccgaaatgtttttgggtaaatctccattcattcaatgaagggaaattgttatgaaaaaagttctgtatggcatttttgccatatctgcgcttgcggcgacttctgcgtgggctgcacctgtacaggtgggcgaagcggcagggtcggcagcaacgtcggtttcggcggggagttcctccgcgaccagcgtcagcaccgtaagctcggcggtgggtgtcgcgcttgcggcaaccggtggcggtgatggttctaataccgggaccaccacaaccacgaccaccagtacccagtaataaagtatgtatccccaaaataattcgagtcattgcatctgtggctagaagtatgaagggattaaccataaccacactccggtgtggttattctgcccctctggagaagagtcgtgaagcgacctgcactcattcttatctgcctgttattacaggcctgttcagccacgactaaagagctgggcaattcactgtgggacagtctgttcggcacgccaggcgtacagctgacggatgatgatattcaaaatatgccctacgccagccagtacatgcagcttaatggcgggccgcagttatttgtggtgctggccttcgctgaagacggacaacaaaaatgggtcactcaggatcaggctactctcgttacccaacatggccgtctggtgaagactctgctcggcggcgacaacctgattgaagtgaataaccttgctgccgacccgctgattaaacccgcacaaatcgttgatggcgcaagctggacgcgcacgatgggctggaccgagtaccagcaggtacgctacgccaccgcacgctcagtcttcaaatgggatggcaccgataccgtcaaagtcggcagcgatgaaaccccggttcgcgtgctggacgaagaagtctccaccgaccaggcgcgctggcataaccgctattggatcgacagcgaagggcaaattcgccagtcggaacagtatctcggcgcggattattttccggtgaaaaccactctcatcaaggcggcaaaacaatgattaaacaaactattgtcgcgttgcttttgagtgtgggagcgtcatcggtcttcgcggcaggaaccgtcaaggtgttcagcaatggcagcagtgaggccaaaacgctaacgggcgcagagcatttaatcgatctggtaggccaaccgcggctggcaaacagctggtggcccggtgcggtgattagcgaagagctggcaacggcggcagcattgcgtcagcagcaggcgttgctgacacggctggcagaacagggcgcagattccagcgccgacgatgccgctgcgattaacgccttacgccagcaaattcaggcgttgaaagtgacgggcaggcaaaaaatcaatcttgatcccgatatcgtccgcgttgccgaacgcggtaacccgccgttgcagggcaactacacgctgtgggtcggaccaccgccgtccacggtcacgttgttcgggcttatcagccgtcctggcaagcagccattcactccaggtcgcgacgtggcgagctatctctctgaccagagcctgctcagcggtgcggatcgcagctacgcgtgggtggtttacccggacggacgcacgcaaaaagcgccggtggcttactggaacaagcgtcacgtagagccgatgcccggcagcattatttatgttggcctcgcggactccgtctggagtgagacgcctgatgcccttaacgccgacattcttcagactctgacgcagcggatacctcaataatgaaaaaaagacatctgcttagcttactggcgctgggcattagcacagcttgctacggcgaaacatatcctgcgcccattggtccgtcgcagtcggatttcggtggcgtaggattattacaaacgcccaccgcgcgtatggcacgggaaggggagttgagtctgaactatcgcgataacgatcagtaccgttattactcagcttcagtgcaactcttcccgtggctggaaacaacgctgcgctacaccgacgtgcgcacccggcagtacagcagcgtcgaagcgttctctggcgatcaaacgtataaagataaagccttcgatctcaaactgcgtttgtgggaagagagttactggctgccgcaagtggcggttggtgcgcgggatatcggcggtacggggctgtttgatgcggaatatcttgttgccagcaaagcctgggggccgttcgattttacgctcggcctgggctgggggtatttgggcaccagcggtaatgtgaaaaatccgctctgttcagccagtgataaatattgctatcgcgataacagctacaaacaggcgggatctatcgacggtagccagatgttccacggtcctgcctcactgtttggcggcgtggaataccagacgccctggcaaccgctgcgcctgaaactggagtatgaaggcaataattatcagcaggattttgccgggaagctggagcaaaaaagtaagtttaacgtcggtgcgatttatcgcgttaccgattgggccgacgttaaccttagctatgaacgtggcaacacctttatgtttggcgttacgttgcgcaccaactttaacgatctgcgcccgtcttacaacgataacgcccgcccgcaatatcaaccgcagccgcaggatgccattttgcagcattcggtggtggcgaatcagttaacgctgttgaaatacaatgccggacttgccgatccacagatccaggcgaaaggcgatacgctgtatgttaccggcgagcaggtgaaatatcgtgattcgcgcgaagggatcatccgtgcgaatcggatcgtgatgaacgatctgccggatgggatcaaaacgatccgcattacggaaaatcgccttaacatgccgcaggtgacgacggaaaccgatgtcgccagcctgaaaaatcatctcgccggagagccgttgggccacgaaacgacgctggcgcaaaaacgcgtcgagccagtggttccgcagtccaccgagcagggctggtatatcgacaaatcacgctttgatttccatatcgatccggtgctgaaccagtcggtcggtggcccggaaaacttttacatgtatcagctgggcgtgatgggaacggcagatttgtggctgacggaccatctgctgaccaccggcagcctgtttgcaaatcttgccaacaactacgacaagtttaactacactaatcctccgcaggactcgcacttaccgcgcgtgcgtacccatgtgcgcgagtatgtgcagaacgatgtctatgtgaataacctgcaagccaactacttccagcatctgggcaacggcttctacggtcaggtctacggtggttatctcgaaaccatgtttggcggtgcgggggcagaagtgttgtatcgcccgctggacagcaactgggcgtttggtctggatgccaactacgttaaacagcgcgactggcgtagtgcaaaagatatgatgaaattcaccgactacagcgtgaaaaccggacatctgaccgcctactggacgccatctttcgctcaggatgtgttagttaaagccagcgtcgggcagtatctggcaggggataaaggcggcacgctggagatcgccaaacgctttgatagcggcgtggtggtgggtggctatgccacgatcactaatgtttcgaaagaggagtacggcgaaggggacttcaccaaaggcgtgtatgtctcggtaccgttggatctcttctcgtctggcccgacacgcagccgtgcggcgattggctggacgccgctgacgcgtgacggtggtcagcaacttgggcgtaagttccagttgtatgacatgaccagcgaccgtagcgtcaatttccgctaagtcatgggaaaggtgccagttttcgcactcactggcaccttcattcttaatggcctgtcgagccatcaggaacgcagttcactcccggtttgcgatctggtgtgtaaaggcgaaaacattctgtcttcctgtccgtcgatatcggttgcaggtctggttgcctgagcgactgggccatcattgggctggagacattgctttgcggtaggtcggctttatcagcagtaccgagcggaccagcataagcaggaagaacagagactgataacatcaaagcagcaaaataaggcttcatttttaccacctttatcaggttacgtttcatttgttccagaggaacattgtcgatttttcgcgcattgctggtggctgggaatcacctgaatgggtgatttttgaattaccggctttggtgcggtttgtcttgccggatgcgccgccaggcgcggcttatccggcctacgggtaggtatatccggctttggtggaggcgcgctccaaatccaggttgaacaaaacatacacaaaaaatatagatctccgtcacatttttgcgttatacaggaagctcgccactgtgaaggaggtactgctatgacgtcactctctcgtccgcgcgtggagtttatctccaccattttgcagaccgtactcaatcttggcctgctgtgcctcggcctgattttggttgtcttcctcggcaaagaaacggtgcatctggctgatgtgctgttcgcgccagaacaaaccagcaaatatgagctggtagaaggactggtggtttactttctctatttcgaatttatcgcgctgattgtgaagtactttcagtccggttttcacttcccgctacgttactttgtctatattgggatcaccgccattgtgcgcttgatcatcgtcgatcataaatcgccactggatgtgttgatctactcggctgcgatcctgttactggtgatcaccctgtggctgtgtaattcgaaacggctgaagcgggagtaaaaagtcagcacgccgaaatggcgcggcgtgctggacaggaagattacagcgtagcagtttgttgtgttttcttcgtttccggttcccagagcgcttccagctcctcaagggttttacctttggtttccgggacaaatttccacataaacagtgctgccagaacgcccatacaaccgtaaatccagtaggagaaaccgttgtggaaatgggccaccagccaggagtttttgtccatcatcgggaaggtccaggagacgaagtagttcgccagccactgggccgccaccgcgattgccagcgctttaccacgaatagcattcgggaagatttccgacagcagtacccagcataccggaccccaggacatggcaaaggcggcaacatagaacagcatcgacagtagcgccacaatacccggtgcctgagtgtaaaacgcggtaccgaggctaaacataccgattgccattccgagtgcgccgataatttgcagtggcttacgaccaaatttatccaccgtcataattgccagaacggtgaaggtgaggttgataactccgacaataatggtctgcaacagcgcgatatccgtgctggcccccagcgttttgaacacttccggcgcgtagtacagcaccacattgatgccgacaaattgctggaagatggagagcattacgccgattacaatcacgcccacgccaaacatcagcagacgaccaccggttttgcggccatgatccagggagtgtttaatttcctgtactgcctgagttgcaagcgtgttgcccataattttgcgcaggataccttccgcctgttcttgcttgccgcgcgacatcagccagcgaggactttctggcacggtatacagcagcattaagaacagcagtgcagggatacattccgaggcaaacatataacgccagccgtcagtattcagccagctggcatcaccggaacgggcaataaaatagtttacgcagtaaactaaaagttgcccgaaaataatcgcaaactggttaaaagagaccagtttcccgcgaatatgagctggagccagttccgcaatatacattggcgagagcattgaggctaaaccaacgccaataccgccaataatgcgataaataacaaattccgggacataacctgccagataaacaggcacagtgttgtccgggtttatagaggtaaaaccaagttctggccaggcagaacctacaccagaaataaaaaacaggacagcagcaatcttaagtgaatcacgacgaccgaagcggttactgcaataaccaccgagggcaccgccgatgatgcaaccaatcagagcgctggccacgcaaaaccctaacagggagttggcagcggattcacttaagttttgtggagcaacaaagacggtattgagtgactcaacagtaccggaaataacggcggtgtcgtagccaaataataaaccacctaatgtagcgactaaggtaatcgaaaatatataactggaattatactgggtattcattcagacctgccttagaccattctgatcttttatcagtgcattgatgttggaattgtcaggcagttaaggcaattatcattttttacaatgcgtttacgtaatgtcttttctgtgatcttaattgtgataattatccaaaattgataaaaacaatactattgccgtgactcagagcacgaaagagaattatcgtaagtgggaaaacaaataacgtaaaaataataagctctatgatggaaatattaaccggcgaacgattcagattgcagacgaaagaaaaaaaggcgctccgtggagcgccgaataacagtcacaagttgggataacgtaagttgagggtgcagcggcataacattggcagaacaacatctttaacctttcacaccacctgccgtcaggccgttgaccagccagcgttgagccagcaagaagacgatggtgatcggtaatgcagacatcacggcagcggcggcaaagtcaccccacaggtagttttgcgggttgaggtattgctgcatccccacggccagggtgtagctgtttacgtcacgcagtaacagcgacgcgaccggaacttcagtaatggcagcgataaacgacaggatgaataccaccgccagaatcggtactgacagcggcaacaggacaaggcggaaggcctgccacggtgtcgcaccatccagcgcagcagcttcttccagcgaactgtcgatggtttcgaaatagcctttgatggtccagacatgcagcgcaatcccacccagatacgcgaaaattacgccgccgtgagtattcaggccaatgaatggaatgtactcacccagacgatcaaacaacgcatacaacgcgaccagtgaaagtactgccgggaacatctggaaaatcagcattcctttcagcagcgtcgctttgcctggaaagcgcatacgggcgaaagcgtaggcgcaggtggtggagagcgccacaatgccaatcgcggaaatcccggcgacctttaccgagttccacagccacagcagtaccgggaatggcggtggcgtaatgcgaccatcagcctgttcaacgctaaaacctaacgccagtttccagtgatcccaggagatttgctccgggatcaggctgccggtcgcaaagtttccctgacgcagcgagatagcgacgaccatcagcagcgggaacataatcgctgcgataaaaagtagcagtagcaggtgagtaataaataaacgagctttttgcgatttcggttggaccattgccatttttgttatctcccttaatcaaacttcattcgcgtggctttcaggttcactatcgccagcgcacccaccagcaggaagatcagcgtggcaattgctgccgccagaccgaagtcctgacccccgccgccttcaaaagcgatgcggtaggtgtagttaacaagcaggtcggtataaccggctggcgtggtcgtgccaagacgatccgggccgccgttggttaacagttgaatcagcacgaagttgttaaagttaaaggcgaagctggcgatcatcagcggcgtcagcggtttaatcagcagcggcagcgtaatcttaaagaagttctggaacggacctgcgccatccattgctgaggcttcatacaaatcgtccggaatcgctttcagcaagcccatgcagaggatcatcatgtacggataacccagccaggtattgacgataattagcatcgtgcgggcggtggtcggatcgctgaaccaggcgggcttcacgccaaacagcgcgctcaacatcatgttgatttcaccgaagctctggttaaacaaccctttgaaaatcaagattgaaatgaacgatggcaccgcgtagggcagaatcagcaggacgcgatagaccgctttgccgcgcaacgcttcccactgcaccagacacgccagaaccatgccgaccgccaccgttaaaaagacagtgatcagcgagaacaccacggtccagacgaaaatggcgaggaacggtttctgaatgccttcgtcggtaaagacgcgggtaaagtttttccagccggtggtcacggtgtaaccggggcttagcttttcatcaccccagttgccgtcggcggtaatggactggtaaaagccaatttggttattcggacgatatttcacgccgctctgattattcgtcaacgtgccgtcaccgtcgagtgtgtagagcggctgcgtgccagaaaactggcgcagggagctcatcatcactttgttgccatccggcagaatggcggtaatgtcactcagcgcctgacgattctgggtaatcacgcgcagattcgcgcgttcgccttcgggctgggcggtcgtttctttcagttgcagtttttgctcgccgccaaatttaaaagcgtcggagaggtaatttttgccggtttcgccgtcgctgagcgccagttgccactcatcgcccgccgggtaaagaccaaagttataggttttgcctgcttgccaggagcgatctaacaacacttcctgcgcacgttcaaaagtcagctggttagtgctgctgtagttggtgaaggcaatggcgatggtgcagaccagagggaagaggacgaataatcccattccagccattcccgggtaaacatagcgccaggcgtaggctttacgattggcgaaaatatacagccccgctgaactcaatatcagcgtggtaatggcgaacaggtattccccttgtgcgtacattaaaacaacaaggtaacccaccagcaggccgagcagacctagcactgaccatttcagcgcgtcgctttgccaccaatgtttctttttaatgacatccatggggttcttcctcattccaggacggataaggctttcacgccttatccgacaacaactgcctgatgcgacgctgacgcgtcttatcaggcctacatacgtttcggttttgtaggccggacaaggcgttcacgccgcatccggcatttcacagcattacttggtgatacgagtctgcgcgtctttcagggcttcatcgacagtctgacgaccgctggcggcgttgatcaccgcagtacgcacggcataccagaaagcggacatctgcgggatgttcggcatgatttcacctttctgggcgttttccatggtggcggcaatacgtggatctttcgccaactcttcctcgtaagacttcagcgctacggcacccagcggtttgtctttattaaccgcttccagaccttcatcagtcagcagatagttttcgaggaactctttcgccagctctttgttcggactggcggcgttaatacctgcgctcagcacgccaacgaacggtttggatggttgacccttgaaggtcggcagtaccgttacaccataattcactttgctggtgtcgatgttggaccatgcccacgggccgttgatggtcatcgctgtttcgcctttattaaaggcagcttctgcgatggagtaatcggtgtctgcattcatgtgtttgtttttaatcaggtcaaccaggaaggtcagacccgctttcgcgccagcgttatccacgcccacgtctttaatgtcgtacttgccgttttcatacttgaacgcataacccccgtcagcagcaatcagcggccaggtgaagtacggttcttgcaggttgaacatcagcgcgctcttacctttcgctttcagttctttatccagcgccgggatctcttcccaggtttttggcgggttcggcagcagatctttgttataaatcagcgataacgcttcaacagcgatcgggtaagcaatcagcttgccgttgtaacgtacggcatcccaggtaaacggatacagcttgtcctggaacgctttgtccggggtgatttcagccaacaggccagattgagcgtagccaccaaagcggtcgtgtgcccagaagataatgtcagggccatcgccagttgccgcaacctgtgggaatttctcttccagtttatccggatgctcaacggtgactttaattccggtatctttctcgaatttcttaccgacttcagcgagaccgttatagcctttatcgccgttaatccagattaccagtttaccttcttcgattttggcgagagccgaggcggaaaacatcatcgtcgttaatgcggataatgcgaggatgcgtgcacctgtttttattttcataatctatggtccttgttggtgaagtgctcgtgaaaacacctaaacggactctagtttctttatacggcaacctctttccatcctccttgcccctacgccccaccgtcgctttgtgtgatctctgttacagaattggcggtaatgtggagatgcgcacataaaatcgccacgatttttgcaagcaacatcacgaaattccttacatgacctcggtttagttcacagaagccgtgttctcatcctcccgcctcctcccccataaaaaagccagggggtggaggatttaagccatctcctgatgacgcatagtcagcccatcatgaatgttgctgtcgatgacaggttgttacaaagggagaagggcatggcgagcgtacagctgcaaaatgtaacgaaagcctggggcgaggtcgtggtatcgaaagatatcaatctcgatatccatgaaggtgaattcgtggtgtttgtcggaccgtctggctgcggtaaatcgactttactgcgcatgattgccgggcttgagacgatcaccagcggcgacctgttcatcggtgagaaacggatgaatgacactccgccagcagaacgcggcgttggtatggtgtttcagtcttacgcgctctatccccacctgtcagtagcagaaaacatgtcatttggcctgaaactggctggcgcaaaaaaagaggtgattaaccaacgcgttaaccaggtggcggaagtgctacaactggcgcatttgctggatcgcaaaccgaaagcgctctccggtggtcagcgtcagcgtgtggcgattggccgtacgctggtggccgagccaagcgtatttttgctcgatgaaccgctctccaacctcgatgctgcactgcgtgtgcaaatgcgtatcgaaatctcccgtctgcataaacgcctgggccgcacaatgatttacgtcacccacgatcaggtcgaagcgatgacgctggccgacaaaatcgtggtgctggacgccggtcgcgtggcgcaggttgggaaaccgctggagctgtaccactatccggcagaccgttttgtcgccggatttatcggttcgccaaagatgaacttcctgccggtaaaagtgaccgccaccgcaatcgatcaagtgcaggtggagctgccgatgccaaatcgtcagcaagtctggctgccagttgaaagccgtgatgtccaggttggagccaatatgtcgctgggtattcgcccggaacatctactgccgagtgatatcgctgacgtcatccttgagggtgaagttcaggtcgtcgagcaactcggcaacgaaactcaaatccatatccagatcccttccattcgtcaaaacctggtgtaccgccagaacgacgtggtgttggtagaagaaggtgccacattcgctatcggcctgccgccagagcgttgccatctgttccgtgaggatggcactgcatgtcgtcgactgcataaggagccgggcgtttaagcaccccacaaaacacacaaagcctgtcacaggtgatgtgaaaaaagaaaagcaatgactcaggagatagaatgatgattactctgcgcaaacttcctctggcggttgccgtcgcagcgggcgtaatgtctgctcaggcaatggctgttgatttccacggctatgcacgttccggtattggttggacaggtagcggcggtgaacaacagtgtttccagactaccggtgctcaaagtaaataccgtcttggcaacgaatgtgaaacttatgctgaattaaaattgggtcaggaagtgtggaaagagggcgataagagcttctatttcgacactaacgtggcctattccgtcgcacaacagaatgactgggaagctaccgatccggccttccgtgaagcaaacgtgcagggtaaaaacctgatcgaatggctgccaggctccaccatctgggcaggtaagcgcttctaccaacgtcatgacgttcatatgatcgacttctactactgggatatttctggtcctggtgccggtctggaaaacatcgatgttggcttcggtaaactctctctggcagcaacccgctcctctgaagctggtggttcttcctctttcgccagcaacaatatttatgactataccaacgaaaccgcgaacgacgttttcgatgtgcgtttagcgcagatggaaatcaacccgggcggcacattagaactgggtgtcgactacggtcgtgccaacttgcgtgataactatcgtctggttgatggcgcatcgaaagacggctggttattcactgctgaacatactcagagtgtcctgaagggctttaacaagtttgttgttcagtacgctactgactcgatgacctcgcagggtaaagggctgtcgcagggttctggcgttgcatttgataacgaaaaatttgcctacaatatcaacaacaacggtcacatgctgcgtatcctcgaccacggtgcgatctccatgggcgacaactgggacatgatgtacgtgggtatgtaccaggatatcaactgggataacgacaacggcaccaagtggtggaccgtcggtattcgcccgatgtacaagtggacgccaatcatgagcaccgtgatggaaatcggctacgacaacgtcgaatcccagcgcaccggcgacaagaacaatcagtacaaaattaccctcgcacaacaatggcaggctggcgacagcatctggtcacgcccggctattcgtgtcttcgcaacctacgccaagtgggatgagaaatggggttacgactacaccggtaacgctgataacaacgcgaacttcggcaaagccgttcctgctgatttcaacggcggcagcttcggtcgtggcgacagcgacgagtggaccttcggtgcccagatggaaatctggtggtaatagcaaaacctgggccggataaggcgtttacgccgcattcggcaaccaacgcctgatgcgacgcttgcgcgtcttatcaggcctacaacggctgtcaaatgtaggccggataaggcgtttacgccgcatccggcataaaaacaggttgtcattatctgaaaggggcgaaagcccctctgattatcgggtttagcgcgctattgcctggctaccgctgagctccagattttgaggtgaaaacaatgaaaatgaataaaagtctcatcgtcctctgtttatcagcagggttactggcaagcgcgcctggaattagccttgccgatgttaactacgtaccgcaaaacaccagcgacgcgccagccattccatctgctgcgctgcaacaactcacctggacaccggtcgatcaatctaaaacccagaccacccaactggcgaccggcggccaacaactgaacgttcccggcatcagtggtccggttgctgcgtacagcgtcccggcaaacattggcgaactgaccctgacgctgaccagcgaagtgaacaaacaaaccagcgtttttgcgccgaacgtgctgattcttgatcagaacatgaccccatcagccttcttccccagcagttatttcacctaccaggaaccaggcgtgatgagtgcagatcggctggaaggcgttatgcgcctgacaccggcgttggggcagcaaaaactttatgttctggtctttaccacggaaaaagatctccagcagacgacccaactgctcgacccggctaaagcctatgccaagggcgtcggtaactcgatcccggatatccccgatccggttgctcgtcataccaccgatggcttactgaaactgaaagtgaaaacgaactccagctccagcgtgttggtaggacctttatttggttcttccgctccagctccggttacggtaggtaacacggcggcaccagctgtggctgcacccgctccggcaccggtgaagaaaagcgagccgatgctcaacgacacggaaagttattttaataccgcgatcaaaaacgctgtcgcgaaaggtgatgttgataaggcgttaaaactgcttgatgaagctgaacgcctgggatcgacatctgcccgttccacctttatcagcagtgtaaaaggcaaggggtaattacgccccacagtgctgattttgcaacaactggtgcgtctcctggcgcacctttttttatgcttccttcctgggatatgagcgattttttatagtaactcacttcttcttcactaagaatatccattatctcaatgccttatcagagattcttttcctttcgccggtagtgtctggacattcaggctacttttccaggttattttatttctgttatgcagaggttttatgataagtcatatcctaaattctggcggcaataactctttgatgaaacatgatgtggtgcaaggaaataatatagtagatcttgatttactacgtaatttaaatggggtgccaggtttaaacagagataactttatttatatcagcaatattttttcaaatataaaacaacggaacgaaaaaatcatgcaataaatatgtttcgtgaagtctcaatcagtaatgatactataagtgtaaaattctacagaaatgaaaaaaattgaatgcgcttgcaattttctgatggataaagatgcgcaggggtatatcgacctgtctgatttggatttaacaagttgtcattttaaaggtgacgttatatcgaaggtgtcttttttatcatcaaatctacaacatgtaacattcgaatgtaaagaaattggggattgcaattttactactgcaatagttgataatgtcatatttagatgtcgacgtttacacaatgtgatttttatcaaagcgagtggtgaatgtgtcgatttcagcaaaaatattcttgatacagttgacttctcgcagagtcaacttggtcatagtaattttcgcgaatgtcagattagaaattcaaacttcgataattgttatctttacgcttcgcacttcaccagagcagagtttctgtctgccaaagaaatatcatttattaaatcgaatttgacagctgttatgtttgattatgtgcgaatgtcgacagggaattttaaagattgcattacagaacaattggaattaactattgattattcagatatattttggaatgaagatctcgatggttatatcaataacattataaaaatgattgatacattgccagataatgcaatgatattgaaatccgttctggccgtaaaactggtgatgcaattaaaaatacttaatattgttaataaaaactttattgagaatatgaagaaaatatttagccattgtccttatataaaagatcccattatacgcagttatatccattctgatgaagataacaagttcgatgattttatgcgtcaacatcgattcagtgaggtgaatttcgatacccaacagatgatcgattttattaacagatttaatacgaataaatggctaattgataaaaataacaatttttttatccaacttatcgatcaggccttacgatcaacggatgatatgatcaaagcaaatgtttggcatctttataaagagtggattcgtagtgatgatgtttcacctatatttatagaaactgaagataatttaagaacctttaacacgaatgaattaacacgaaacgataatatctttatcctgttctcctcagtcgatgatgggccagttatggtggtaagctcccagcgcttacatgatatgttgaatcctacaaaagataccaattggaattccacgtatatctacaaatccagacatgagatgttgcctgttaatcttactcaggaaacacttttcagctccaaatctcatggtaaatatgcgcttttccccatttttactgcgagttggcgagctcatcgtataatgaataagggtgtttaagtaaaggaaaacatcaccgttcctggcatcctggacggtgatgcccctacggttgccctcgccagcacgggcatcggtaaagcgtaaggttcaacatcgttttaccacttcatgcgattgttgcgtttttgttgcgtattagatcacttaatttgctttacatctcccgtaaacacttttctgcgatacaatgcctttacgttatgtaacggagagttcggcatgtcacaccccgcgttaacgcaactgcgtgcgctgcgctattgtaaagagatccctgccctggatccgcaactgctcgactggctgttgctggaggattccatgacaaaacgttttgaacagcagggaaaaacggtaagcgtgacgatgatccgcgaagggtttgtcgagcagaatgaaatccccgaagaactgccgctgctgccgaaagagtctcgttactggttacgtgaaattttgttatgtgccgatggtgaaccgtggcttgccggtcgtaccgtcgttcctgtgtcaacgttaagcgggccggagctggcgttacaaaaattgggtaaaacgccgttaggacgctatctgttcacatcatcgacattaacccgggactttattgagataggccgtgatgccgggctgtgggggcgacgttcccgcctgcgattaagcggtaaaccgctgttgctaacagaactgtttttaccggcgtcaccgttgtactaagaggaaaaaaatatggagtggagtctgacgcagaataagctgctggcgtttcatcgcttaatgcgtacggataagccaattggcgcgttactgctgctctggccaacattatgggcgttgtgggtggcgacaccgggcgttccccagctctggatcctggcggtgtttgtcgcgggtgtctggctgatgcgcgctgccggatgtgtggtgaatgattatgctgaccgcaagtttgatggtcatgttaagcgcacggcgaaccgaccacttcccagcggcgcggtaacagagaaagaggcgcgcgcgctgtttgtcgtgctggtactgatttcgtttttactggtgctgacgctgaatacgatgaccattctgttgtcgattgccgcgctagcgctggcgtgggtgtacccgtttatgaagcggtatacccatctaccgcaagtggtgctgggcgcggcgtttggctggtcgattccaatggcttttgccgctgtgagtgagtcggtgccattgagttgctggttaatgttcctcgccaatattctctgggcggtggcttacgacacgcagtatgcgatggttgaccgcgatgatgatgtgaagattggcattaaatccacggcaatcctgttcggccaatacgataaattgattattggtattttgcagattggcgtactggcactgatggcgatcatcggtgagttaaatggcttaggctggggatattactggtcaattctggtggctggcgcgctgtttgtttatcaacaaaaactgattgccaaccgcgagcgtgaagcctgctttaaagcatttatgaataataactatgttggtctggtactatttttagggctggcaatgagttactggcatttctgatgatgtaaaaaagccggatgatcatccggctttcttctgggttgcctgatgcgcggcgcttctcaggcctacacaacacatcgcaatttattgaatttgcagattatggaaggccggataaggcgttttcgccgcatccggcaattctctctgattacccttcgccctgcgtcgcactctcaatcgtcaaacgcacgtctgatgtaatcaactccgccagcaactgataaaccttcatcgtttctgccggttcggcatcgccgctatcgctgatatacccttcatcacgcagtgtcagcaccagagaactgaacaccgccttgtcgaagaactccggcgcgttgatgccgtgcagcacggagagacgttgcgcgacggtgcggctctctttctccagcgtaccgcggttgatcgacgggttggcactcaacaaccagaaggtgatggcataacgttgcagcgtttcgcgcgcgcctgcggccagcagctgtagcgtgcgagaatgcgccgggttgatatgcaactcatcatcttgcagggtaatcagcccctgacgttgcatctcatttgccagcgcatcaataacgtccggcaactcgtcgcgatcccagcgcaggaacagctccgctttcagcattgggtaaagcacattgacgtgctccatcaatacgtcgcgggagatgtggcgatgctgggtgacgattgccgccatcagcgaaggcagcaccaacatatgcgcaatgttgttgcgatagtaggtcatcagcaccgcttgctcgcgcggcagaatgatgatgtcgccgattgtgtctttctcgacttcaaacttgttcatttgcagcgcgtgatcgataagctcgctggcgctggctgaaggaacggtagagtccgtggagtagggcacgttgcgcatcagatccaggtagcagttgagttgctcggttaactgctcgcgggtgagtgagcgctgacgtgatgccagtagcgcagtacagcacaggttcatggcgtttgccgcgcctgcgttgttaatgcgtaccatcagatcggcagcaatattattgaccgtcggcgttaaccatgccggacgcaccgcttcgatgggatcgatagattcacgccagtcaggtacatgctggttaaggtaggtcatcaacggcattggttcaccgaagttgacgtaaccctgaccgagattacgcagcttgcttaaaccgcgcagcatctgcggcaggctctctttctctttcgtcgcgccgcgcagttctttggcgtaagtacccacttccatgacgtgctcataaccgatatagatcggaatcagcgtaatcggacgcgtgccgccacgcagcatcgcctgaatggtcatcgacagcgtaccagttttcggatccagcaaacgccccgtacgggaacgaccgccttccacgaagtactcgacggaataaccacggctgaacagttcgccgagatactcccggaaaacggtggaataaagtttattgcctttaaacgtacggcgaataaagaacgcccccagacggcggaaaatcggcccggcaggccagaaattcaggttgatcccggcggcgatatgcggcggcaccagcccctggtgatacagcacgtaagaaagcagcaggtagtccatgtgactgcggtggcaaggcacatataccagctcatgaccgtcgtgggccagctggcgaacgcgctcagcgttatggacgttgatgccctggtaaagtcggttccaggtgaagcccagaatacggtcagtcaggcgaatcatctcgtaagagaaattcgccgcaatctcttccatcagtgcaatcgcgttctgctgcgctttttcatgggagatttttttgctgcgcgcttcatcttctaccgctttggcaatggcgcgggaggcgagcagcttattaaacagatcctgacgagcaggcaaacgtgggcctacggcagccagacgttgacgggcaaagtgcatacgcgccacgcgcgccagtttctgagcgatagttttatccgtgccgtgttcatccgccatacggcgcagcgaaactgacggcgagaaacgcacaaaactgtcgcgaccgagccacagtacagcgaaaaatttctgtacgccgttaagcatacgcagcggcgggttcacttcgcctttttcacgccccggcgcgcgaccaaacatcaccgacactggcaccatctgcacatccagatttgggttgctacggtgcaaatcgagatagtcgtggaacagcttaatagactcttctttcggcgtgtaataggtgaacacacgcggcccgccgtgaatgaacacatagcgcggcagtagcgtgccgtcgatttccagcggctctaacgggtcaggcaagtcatgtgccagacactgggcgcgcaacgtcagcaaatctgctttcgagttgtacggtaaaacgtacataattggacgagaggtatccagccccagttccggggcaggatctgccggaatagacttgctttttaccaggatgcttaatggtaaattcagtaatttgtagtaaattcgtggccagccggacataaacgatgtaaagcctctggttaataatgcaaatgcgcggcaaggatagcagaaagtcatgggaaattctgtggtatccgctcatgtttcgcgcggcgctacgcaaacccgaatcatcggatttaacggtacactgatattgacgctcataatgtaaaaaggttctttcaatggccaataataccactggattcacccgaattatcaaagctgctggctattcctggaaaggtttacgcgctgcatggatcaacgaagcggcattccgtcaggaaggcgtagcggtattgttggcggtggtcatcgcctgctggctggatgtggacgcgattacccgcgtgctgcttatcagctccgtgatgctggtgatgattgtggaaatcctcaatagcgccatcgaagcagtggttgaccgaattggctctgaataccatgagctttccggacgcgcaaaagatatgggatccgctgcggtgctgattgccattatcgtcgccgtgattacctggtgcattctgttatggtcgcattttggataacccttccagaattcgataaatctctggtttattgtgcagtttatggttccaaaatcgccttttgctgtatatactcacagcataactgtatatacacccagggggcggaatgaaagcgttaacggccaggcaacaagaggtgtttgatctcatccgtgatcacatcagccagacaggtatgccgccgacgcgtgcggaaatcgcgcagcgtttggggttccgttccccaaacgcggctgaagaacatctgaaggcgctggcacgcaaaggcgttattgaaattgtttccggcgcatcacgcgggattcgtctgttgcaggaagaggaagaagggttgccgctggtaggtcgtgtggctgccggtgaaccacttctggcgcaacagcatattgaaggtcattatcaggtcgatccttccttattcaagccgaatgctgatttcctgctgcgcgtcagcgggatgtcgatgaaagatatcggcattatggatggtgacttgctggcagtgcataaaactcaggatgtacgtaacggtcaggtcgttgtcgcacgtattgatgacgaagttaccgttaagcgcctgaaaaaacagggcaataaagtcgaactgttgccagaaaatagcgagtttaaaccaattgtcgttgaccttcgtcagcagagcttcaccattgaagggctggcggttggggttattcgcaacggcgactggctgtaacatatctctgagaccgcgatgccgcctggcgtcgcggtttgtttttcatctctcttcatcaggcttgtctgcatggcattcctcacttcatctgataaagcactctggcatctcgccttacccatgattttctccaatatcaccgttccgttgctgggactggtcgatacggcggtaattggtcatcttgatagcccggtttatttgggcggcgtggcggttggtgcaacggcgaccagctttctctttatgctgttgctgtttttacgcatgagcaccaccgggctgactgcgcaggcttatggtgccaaaaatcctcaggcattagcccgtacgctggtgcaaccgttgctgttggcgttgggggctggggcgttaattgcgctgctgcgtacgccgattatcgatctggcgctgcatattgttggcggtagtgaggcagtcctggaacaggcgcggcgctttcttgaaatccgctggttaagcgcaccggcgtcgctggcgaatctggtattactcggttggttactcggcgtgcaatatgcccgtgcgccagtaattttgttagtggtcggcaatatcctcaacattgtgctggatgtctggctggtgatggggctgcatatgaacgtgcagggcgcggcgctggcgacggttattgcggaatatgcaacattgctgattggtctgctaatggtgcgtaaaatcctcaaactacgcggaatttccggcgaaatgctgaaaactgcctggcgaggaaacttccgtcgcttgctggcgcttaaccgcgatatcatgctgcgttcgctgttgttgcaactctgtttcggcgcgatcaccgtacttggcgcgcgactggggagtgacattatcgctgttaacgcggttctgatgacgctactcacctttaccgcctatgcgctggatggttttgcctacgcggttgaagcgcactccggtcaggcatacggtgcgcgcgacggtagccagttgctggatgtctggcgggcagcgtgccgccagtcggggatcgtagcgttactgttttcggtggtttatttgctggctggggaacacatcattgcgttactgacgtcgttaacccagattcagcagctggctgaccgctatcttatctggcaggtgattttgccggtggttggcgtctggtgttatctgctggacggcatgtttataggcgcaacgcgtgccaccgaaatgcgtaacagtatggcggtggccgccgcaggttttgcgctgacgctccttacgctgccgtggctgggtaatcatgctttgtggctggcattaaccgtctttctggcgttgcgcgggctttctctggcggctatctggcggcgtcactggcgcaatggtacctggtttgccgcaacgtgacggttaaaaattctgaataaataatcctaagccaaattgctgactacacttaatctcacgttcagaagaaaagtgaacgtactctcattcacaacctaacgatgaggtcttgattatgaataaagatgaagccggcggtaactggaaacagtttaaaggtaaagtgaaagagcaatggggcaaactgaccgatgatgatatgacgatcattgaaggtaaacgtgatcaactggtcggtaaaatccaggaacgttatggttatcagaaagatcaggcagaaaaagaggtcgtggattgggaaacccgcaatgaatatcgctggtaattaatccctcctgcccgacgtgtacaaggatgtacgccctcttaacgcggtttctttttcacctgcacagagtgatcatgctggcactgttcaggatgacgacacgcttccacttctacacatgccgcacagagcccatgtgcttcaatcacattatgccgcagggcaaaccccatttttgccgccagcgtatgcataatgtcttccacgccttctgcacactcttctttcactgcgccgcagcgatcgcaaataaacatggctgacgtatgggtgggctgatcgaacagatgacagagcacataactgttggtggattccaccttatgcacaaaaccttgctcaagcagaaaatccagcgcgcgataaaccgttggcggcttggcttgcggttcagcttcgcgcagtaaatcaagcagatcataagcgctgatagcgccatcctgcagactcatcaggcgcaacacttccaggcgctgtggggtcaggcgcacattacgctgcgcgcagattttttcagcctgcgctaataactcctgcgttgtggtcttttccatcgggcacctcaaagtgggggttaagaatgtccttactttaccatgttccaggaaaaacaccgagaacccttattgttgccgtaatgttgattttctgttttgtaggtaaggtgttatgttgccttgtcgtaccattatcaacacgataataattaataattcatttttaaataaattgcttcaagttaactcgctatttatttaactgggtttaaacgcatacctgtagttcagaaattatgagcgatttttgatagtgaccagatggcaaaagaattataaggaggacacggtacgacaaaaaaggtagatgaatcatgttgaagataatacccggtgcaactggatactttaataaaacactcaattcaaatcaattcgataatgaagatgcaatcaaagataaattagataatagaggttcaatcaaaggtaaattaaataatatatatggtaaatctattgattatgcagcgctgcgtcatcgggatataattattgcaaaaatagatttgtttattcaacgaatcacgcataatttatggcatgcacgtaaaaaaatgtgtttttaattgtgcaaataaatgatctcaaaatgtgggtcaataagtatattgacgattgcactgatgaggatttaaacgatcgtgactttattgcatcagttgttgaccgggctatttttcatttcgcgattaatagtatatgtaatcctggggataataaagatgcaatgcccattgaacaatgtacttttgatgtagaaactaagaatgaccttccctccacggttcagctattttatgaggaatctaaggataatgaacctttagcgaatatacattttcaagcaataggttctggttttttaacgtttgttaatgcctgccaggaacatgatgacaacagcttaaaattatttgcttcgctgttaatttcactttcatattctagtgcctacgcagatttatcagaaacagtgtatattaatgaaaataatgagagctacctgaaagctcagtttgaaaaattatctcaacgtgatatgaagaagtacctgggagagatgaagcgtctggctgatgggggagaaatgaattttgatggctatctggataagatgtcacatctggtgaatgaaggaacgctcgatcctgatattttaagcaaaatgcgagatgctgcaccacaattaattagcttcgcgaagtcgtttgacccaacctcaaaggaagagattaaaatacttacagacacttctaaattaatttatgatttgttcggggttaaatcggagaaataatatgtgaagttcttcgatagtatggaaggcattatataaaaggacccaatatttattgggttcttttttctctatcaatactattagcagggagatatatcaccagagtttaatgtgtgattttttatttatcgtcgaacctggattgtttatcattggccttaacaaagttaacggctaataagattatttccatcacttcgtgagagcttcatgccttgagaggatctcaattttcttttgcaatgagacaggcgcttcctgttgttatggtatagtaccccgctattgagcctcctgaatagtgatgctgaataacataaccccatgatatatcgataaaataatctctacatttgaaaatgcacggtaattctgaaatgcaaaaaatcaaccaaaccagcgcaatgcctgaaaaaactgacgttcactggagtggtcggtttagcgttgcaccaatgctcgactggacggacagacattgccgctatttcttgcgtctgctttcccgcaatacgttgctgtataccgaaatggtgaccacaggggcgattattcacggtaaaggtgattatctggcgtacagtgaagaagaacatccggtagcgttgcaactgggcggtagcgatccggcggcgctggcgcagtgtgcaaagctggcagaagcgcgcggatatgatgagatcaacctgaatgtcggctgcccgtctgaccgggtgcagaacggcatgtttggtgcgtgtctgatgggtaatgcgcagctggttgccgactgcgtgaaagcgatgcgcgatgtggtgtcgattccggtgacggtgaaaacgcgtattggcatcgacgaccaggacagctatgaatttctctgcgatttcatcaataccgtttccggcaaaggcgagtgtgagatgttcatcatccacgcacgtaaagcctggctttcggggttaagcccgaaagaaaaccgtgaaatcccgccgctcgattatccgcgtgtgtatcaactgaagcgtgactttccgcatctgacaatgtcgattaacggtggtatcaagtcgctggaagaggccaaagcacacctgcaacatatggatggcgtgatggtcgggcgcgaggcgtatcagaatccgggtattctggcggcggtagaccgggagatctttggttcctcggataccgatgccgatccggtggcggtagtgcgcgccatgtatccgtacattgagcgtgaactcagccaggggacgtatctcggccatattacccggcatatgttgggcttgttccagggtattcctggcgcgcggcagtggcggcgttatttaagtgaaaatgcccataaagcgggtgcagacattaatgtgctggaacacgcgctcaaactggtggcggataagcgttaacttttcaccaaaaagtagtcaaattcaccacgccctgcgcaccgtcgcggggcgttttgctgttaaatcaatagattatttttggcatgattcttgtaatgccagcaagagatttcatatttgggagagcatcatgctggaactactttttgtgattggcttttttgtcatgctgatggtcaccggcgtttcgttgctgggcattatcgccgcgctggttgtggcgacggccattatgttcctcggcggtatgctggcattgatgattaagttgctgccgtggttactactggcgattgcggtggtgtgggttattaaggcgattaaagcaccaaaagtgccgaaatatcagcgttatgaccgctggcgttactaagggattgtgcggatgatcacaacctaaggttttatccttagaacaaaataggaattgataatcaaatctgtcactattgcgcctctaacagattcatcgtgctgtaccctacatacagccgaactataaaaagaaagggcttcccaggtggaagccctatttcttttatggaatcagcaggctggaaccttgcgtcgcccggctttccagaatctcatgcgcacgctgcgcatccttcagcggatatttctgctgctcggcgacatcgaccttaatcacaccgctggcaatcaaagagaacagttcattactggcctcggttaattcctcccgcgtggtgatatagccttgcagggaagggcgtgtcacatacaacgagcctttttgattgagaatgcctaagttcacaccggtaaccgcacctgatgagttgccaaaactgaccattaagccgcggcgttgcaggcaatccagcgaccgttcccaggtgtctctgcccacggaatcgtacaccacgcgcactttcttaccgccggtgatctcttttaaccgctcgaccagatcctcttcacgatagttaataacctgccacgcgcccgcttttagcgcgctctgcgctttttgcgcggttcctacggtgccgataagtttcgcgcccagggcttttgcccactggcaggcaattaagccaacgccgccagccgctgcgtggaacaggaactgttcatcgggtttaatttcataggttttgcgcagcagataataaaccgttaagcctttcaggaaggatgccgcagcttgctcaaaagaaattgccgcaggcagaatcgccgctttatccgcaataatgttatgcacagagctgtaagcgcctaacgccgactgcgcatagactacacgatcgcctgccttaatatgctttacaccactgccgactttactcacgatgcctgctgcttcggtgcctaatccgctgggtagcgatggcggcgggtaaaggccgctgcggatatatgtgtcgataaaattgatgccgatggctttattttcgacctggatttcattctccgccggatcggcaggagtgaactctacggcttgaagtacttccgggccaccgtgcttgtgaaattcaattcgtgttgccatgtgtcctccagaacgtatcgtcagggtctgcttcatatgataaagtttcgacccattctttatctcggtaactccattcactatggcaggaaataaacccttcaacaaacagcaggctgaaccccgcgaacgcgatccacaagttgccgggctgaaagtgcctccgcactcgatcgaagcggagcagtcggtgttgggcggtttaatgctagataacgaacgctgggatgatgtagccgagcgtgtggtagcagacgatttttacacccgcccacaccgtcatatctttactgaaatggcgcgtttgcaggaaagcggtagccctatcgatctgattactcttgcggaatcgctggaacgccaggggcaactcgatagcgtcggtggttttgcttatctggcagagctgtcaaaaaatacgccaagtgcggctaacatcagtgcctatgcggacatcgtgcgtgaacgtgccgttgtccgtgagatgatctcggttgcgaatgagattgccgaagctggttttgatccgcaggggcgtaccagcgaagatctgctggatctggctgaatcccgcgtctttaaaattgccgaaagtcgtgcgaacaaagacgaagggccgaagaacatcgccgatgtgctcgacgcaaccgtggcgcgtattgagcagttgtttcagcagccacacgatggcgttaccggggtaaacaccggttatgacgatctcaacaaaaaaaccgctggcttgcagccgtcggatttgatcatcgtcgccgcgcgtccgtcgatgggtaaaacaacatttgcgatgaacctcgtcgaaaacgcggcgatgttgcaggataaaccggtacttatcttctcgctggagatgccatcagaacagatcatgatgcgttctctggcgtcgctgtcgcgcgttgaccagactaaaatccgtaccgggcagctcgatgacgaagactgggcgcgcatttccggcaccatgggtattttgctcgaaaaacgcaatatctatatcgatgactcctccggcctgacgccaacggaagtgcgttcccgcgcacgccgtattgcccgtgaacacggcggcatcgggcttatcatgatcgactacctgcaactgatgcgcgtaccggcgctttccgataaccgtacgctggaaattgcagaaatctctcgctcgctgaaagcactggcgaaagaactgaacgtgccggtggtggcgctgtcccagttgaaccgttctctggaacaacgtgccgacaaacgcccggtcaactccgacctgcgtgaatctggctctatcgagcaggatgcggacttgatcatgtttatctatcgtgatgaggtgtatcacgaaaacagtgatttaaaaggcatcgcggaaattattatcggtaaacaacgtaacggcccaatcgggacggtacgcctgacctttaacggtcaatggtcgcgcttcgacaactatgcggggccgcagtacgacgacgaataataattattttatgaattaggtaattaaagcaaacacttatcaaggaacacaaatgcaagcggcaactgttgtgattaaccgccgcgctctgcgacacaacctgcaacgtcttcgtgaactggcccctgccagtaaaatggttgcggtggtgaaagcgaacgcttatggtcacggtcttcttgagaccgcgcgaacgctccccgatgctgacgcctttggcgtagcccgtctcgaagaagctctgcgactgcgtgcggggggaatcaccaaacctgtactgttactcgaaggcttttttgatgccagagatctgccgacgatttctgcgcaacattttcataccgccgtgcataacgaagaacagctggctgcgctggaagaggctagcctggacgagccggttaccgtctggatgaaactcgataccggtatgcaccgtctgggcgtaaggccggaacaggctgaggcgttttatcatcgcctgacccagtgcaaaaacgttcgtcagccggtgaatatcgtcagccattttgcgcgcgcggatgaaccaaaatgtggcgcaaccgagaaacaactcgctatctttaataccttttgcgaaggcaaacctggtcaacgttccattgccgcgtcgggtggcattctgctgtggccacagtcgcattttgactgggtgcgcccgggcatcattctttatggcgtctcgccgctggaagatcgctccaccggtgccgattttggctgtcagccagtgatgtcactaacctccagcctgattgccgtgcgtgagcataaagccggagagcctgttggttatggtggaacctgggtaagcgaacgtgatacccgtcttggcgtagtcgcgatgggctatggcgatggttatccgcgcgccgcgccgtccggtacgccagtgctggtgaacggtcgcgaagtaccgattgtcgggcgcgtggcgatggatatgatctgcgtagacttaggtccacaggcgcaggacaaagccggggatccggtcattttatggggcgaaggtttgcccgtagaacgtatcgctgaaatgacgaaagtaagcgcttacgaacttattacgcgcctgacttcaagggtcgcgatgaaatacgtggattaatcgttctgtaatatttgattgtctgtgccggatgcggcgtgaatgccttatccggccaataaaatcctaaaaattcaataagttgatgttctttcatgctcttataaaggtcgtgcctctggcggatgtacgtttgtcatgagtctcactctgttgctaattgccgttcgctcctgaacatccactcgatcttcgccttcttccggtttattgtgttttaaccacctgcccgtaaacctggagaaccatcgcgtgtttcaaaaagttgacgcctacgctggcgacccgattcttacgcttatggagcgttttaaagaagaccctcgcagcgacaaagtgaatttaagtatcggtctgtactacaacgaagacggaattattccacaactgcaagccgtggcggaggcggaagcgcgcctgaatgcgcagcctcatggcgcttcgctttatttaccgatggaagggcttaactgctatcgccatgccattgcgccgctgctgtttggtgcggaccatccggtactgaaacaacagcgcgtagcaaccattcaaacccttggcggctccggggcattgaaagtgggcgcggatttcctgaaacgctacttcccggaatcaggcgtctgggtcagcgatcctacctgggaaaaccacgtagcaatattcgccggggctggattcgaagtgagtacttacccctggtatgacgaagcgactaacggcgtgcgctttaatgacctgttggcgacgctgaaaacattacctgcccgcagtattgtgttgctgcatccatgttgccacaacccaacgggtgccgatctcactaatgatcagtgggatgcggtgattgaaattctcaaagcccgcgagcttattccattcctcgatattgcctatcaaggatttggtgccggtatggaagaggatgcctacgctattcgcgccattgccagcgctggattacccgctctggtgagcaattcgttctcgaaaattttctccctttacggcgagcgcgtcggcggactttctgttatgtgtgaagatgccgaagccgctggccgcgtactggggcaattgaaagcaacagttcgccgcaactactccagcccgccgaattttggtgcgcaggtggtggctgcagtgctgaatgacgaggcattgaaagccagctggctggcggaagtagaagagatgcgtactcgcattctggcaatgcgtcaggaattggtgaaggtattaagcacagagatgccagaacgcaatttcgattatctgcttaatcagcgcggcatgttcagttataccggtttaagtgccgctcaggttgaccgactacgtgaagaatttggtgtctatctcatcgccagcggtcgcatgtgtgtcgccgggttaaatacggcaaatgtacaacgtgtggcaaaggcgtttgctgcggtgatgtaatgcaggaaagcaggctggagctacccagcctgcagtgaaattaaactgtcgtcgctttcactctttctttatagatgatttttttgatgccatcgttctacgtgagagataataaacgttgttagttcttttattgttaagcttatcccaattatctggaattccttatcctgtttttttgggtggagtaataatttctgcacatctaaccattattaaatttaataataagtatcgggtttgttacgatagaatatttctatatcctcaagaatatgctttgccttattgcctgtgactttctgagattcaattatagtatcgttaaattctaatgttaaagagaactcttttttccgctttgtgtaagtttaaccttatattgattaccaatatcaaataaaaaggtcctgtaatgagaataatcacctttaacctcctcggcaaaacagcaaagcgtgcaaatatacataaagtctttcttacccctgattttgttaactaaatcaataaatgcgtgaaaaactttacttgcaatagaacttgatacttcttctccaggtctaaaaaatcttttgcaatttttaactgtgtttctatgtataaaaagaaatctttggcataagagatatctttattatttagtgcatctagctcaacaggtaaagatgtcgttttgttgctattcacatatgatatattcatatcatcatctccatcgcgagtaataaaattaatcaccattgtagggtagggggctggtcaatcagaaatcatctttataaacttcgattgtttttgtaatgctgtatcattaagttcattaaatcgtacagcagataaatgttctatcaaatttcgctcatttgccgaggattcatcataataaacgtaaaattaatgtatccttacatcgagtaataaacattttttatacaaaaaaagacaggaacgtatttactgggttaaatataatcatcctgcttttcatcacaaaaaccgcagataatccttcctttccccggcagctggcgttatggtcagatggtttttgcaacaaatctcacaataaaaagtttcaacatactgactatttagggaaaaatatgcgcaagatcacacaggcaatcagtgccgtttgcttattgttcgctctaaacagttccgctgttgccctggcctcatctccttcaccgcttaaccctgggactaacgttgccaggcttgctgaacaggcacccattcattgggtttcggtcgcacaaattgaaaatagcctcgcagggcgtccgccaatggcggtggggtttgatatcgatgacacggtacttttttccagtccgggcttctggcgcggcaaaaaaaccttctcgccagaaagcgaagattatctgaaaaatcctgtgttctgggaaaaaatgaacaatggctgggatgaattcagcattccaaaagaggtcgctcgccagctgattgatatgcatgtacgccgcggtgacgcgatcttctttgtgactggtcgtagcccgacgaaaacagaaacggtttcaaaaacgctggcggataattttcatattcctgccaccaacatgaatccggtgatctttgcgggcgataaaccagggcaaaatacaaaatcgcaatggctgcaggataaaaatatccgaattttttatggcgattctgataatgatattaccgccgcacgcgatgtcggcgctcgtggtatccgcattctgcgcgcctccaactctacctacaaacccttgccacaagcgggtgcgtttggtgaagaggtgatcgtcaattcagaatactgacagagcgggagagcgtgatgctctcccgaatgctgtttttttaatcacacctttatcctttcgctgtcttgctgcaaactgattaagagagttttatcaaggagcagcacatgtggtatcaaaagacgctcacgcttagcgccaaatctcgtgggtttcatctggtaacggatgaaattctgaatcagctggctgatatgccgcgcgttaacatcggcttactgcatctgttgctgcaacatacctccgcctctctgacacttaatgagaactgcgatcccaccgtacgccacgacatggagcgttttttcctccgcaccgttcccgacaacggaaattatgagcatgactatgagggagcagacgatatgccttctcatatcaaatcctcaatgctgggaacatcgcttgtattgccggtgcataaagggcgtattcagaccggcacctggcaaggcatttggctgggggaacatcgcatccacggcggatcgcgtcgcatcatcgcgacactacaaggggagtaaaaaatgaccatttcggagttgctacaatattgcatggcaaaaccaggcgcagaacagagcgtgcataatgactggaaagcgacgcagatcaaagtggaagatgtactgtttgcgatggtgaaagaagtagaaaatcgcccagctgtttcgctgaaaaccagcccggagctggcggagctgctacgtcagcagcacagcgatgtgcgtccaagccgccatctgaataaagcgcactggagcaccgtgtatctcgacggttcgctgccagattcgcaaatctattatctggtggatgcgtcttatcagcaggcggtgaatttactgccggaagaaaaacgtaaattgctggtgcaactctgaaaggaaaaggccgctcagaaagcggccttaacgattacagcatcggcttaaggaagcgtgccgtgtgtgatgcttcgcactccgcgacggtttctggcgtaccggagacgaggatctcgccgccaccactgccgccttctggtcccaggtcgacaatccagtcagcggttttgatcacgtcgagattgtgctcaatcaccacaatggtgttgccctgatcgcgcagtttatgcagtacgtcgagcagttgctgaatatcggcgaagtgcagaccggtggtcggctcgtcgagaatatacagcgtctgcccggtgccgcgttttgacagttcacgcgccagcttcacgcgctgggcttcaccgcctgaaagggtggttgcggactgccccagtcgaatgtacgtcaggccaacgtccatcaacgtttgcagcttacgcgccagtgcaggtacggcatcaaagaactcacgcgcctcttcgatggtcatatccagcacttcgtggatggttttgcctttgtacttaatctccagcgtttcacggttatagcgtttacctttgcactggtcgcacggcacgtagatatccggcaggaagtgcatctccactttgatcacgccatcgccctgacaggcctcgcagcgtccgccacgaacgttaaagctgaaacgtcccggcgtatagccgcgcgcacgggattccggtacgcccgcaaacagttcgcgcacaggcgtaaacacgccggtataggtcgccgggttagaacgtggagtacgaccaattgggctttggtcgatatcgatcactttatcgaaatgctccagcccctgaatatcgcgatacggtgctggttcggcgatggtcgccccattcaactggcgttgggcaatcgggaacagtgtgtcgttaatcagcgtcgatttaccggaacctgaaaccccggtgatgcaggtaaacagacccaccggcagcgtcagcgtcacgtccttcaggttgttgccgcgtgcgcctgtcagcttcagcactttttccggattcgccggaacgcgtttcttcggcacttcaatcttgcgtttgccgctcatgtactgcccggtcaacgactccggcaccgccataatcgcttccagcggaccttctgcgaccacttcaccgccgtgaacacctgcgcccgggccaatgtcgatcacatggtcagcggcgcgaattgcgtcttcgtcgtgctccaccacaatcacggtattaccgagatcgcgcagatggataagcgtacccaacaggcgctcgttatcacgctggtgcaggccgatagacggctcgtccagcacgtacataacgccaaccaggcccgcaccaatctggctcgccagacggatacgctgtgcttcaccgccagaaagcgtttctgccgagcgggaaagcgtcaggtaattcaggccgacgttaacgaggaatttcagacgatcgccgatctctttaaggattttttctgcaatcttcgcccgctgacctgcgagtttgagattgttgaagaattccatcgcatgaccaatgctcatgtcggagatagcaggcagcggcgtattctcgacatacacgtggcgcgcttcccgacgcagacgcgtcccttcgcagctggcgcacggacgattactgataaacttggctaattcttcgcgtaccgcgctggattccgtctctttatagcggcgctccatattatgcagcacgccttcgaacggatgacgacgaatggaggtatcgccacgatcgttcatgtatttgaattcaatgttttctttgccagaaccgtacaacaccactttatgcacgttcgcgctcaggctgccccacggcgcttcgacgtcgaacttatagtgatctgccagcgatttcagcatctggaaataatagaagttgcggcgatcccagccacggatcgcaccaccagccagcgacagttccggattctggatcactcgatcaggatcgaaatattgctgtacgccaaggccgtcgcaggtcgggcaggcccccgccgggttgttaaacgaaaacagtcgcggctccagttcacgcatactgtagccgcaaattgggcaggcgaagttggcggagaacagcagctcttccgctttcgggtcgtccatatccgccactaccgcggtaccaccggaaagctccagcgcggtttcaaatgactcggcaagacgttgggtaagatcgtcacgcaccttgaagcgatcaaccaccacttcaatggtatgtttcttttgcagttccagttttggcggatcggaaagatcgcagacttcgccatcaatacgagcacggatgtagccctggcttgccaggttctccagcgttttggtgtgttcgcctttgcgctctttaatgattggcgcgagtagcatcagacgcttgccttccggctgcgacagcacgttatccaccatctggctgacggtttgcgccgccagcgggacgtcgtggtccggacagcgcggctcgccaacgcgggcgaataacaaacgcaaatagtcgtggatttcggtgattgtccccaccgtagaacgcgggttatgagacgtcgatttctgctcaattgagatggcaggagaaagcccctcaatatgatcgacgtccggcttttccatcagtgacagaaactgccgcgcgtaggcggaaagggattcaacgtaacggcgctgcccttcggcatataaggtgtcgaaagcgagcgaggatttgccagaacccgaaagcccggtcacgacaatgagcttgtcgcgggggataacgaggttgatgtttttgagattatgggtgcgggcgccccgaacttcgatcttatccattcacctttcccggattaaacgcttttttgcccggtggcatggtgctaccggcgatcacaaacggttaattatgacacaaattgacctgaatgaatatacagtattggaatgcattacccggagtgttgtgtaacaatgtctggccaggtttgtttcccggaaccgaggtcacaacatagtaaaagcgctattggtaatggtacaatcgcgcgtttacacttattcagaacgatttttttcaggagacacgaacatggccagcagaggcgtaaacaaggttattctcgttggtaatctgggtcaggacccggaagtacgctacatgccaaatggtggcgcagttgccaacattacgctggctacttccgaatcctggcgtgataaagcgaccggcgagatgaaagaacagactgaatggcaccgcgttgtgctgttcggcaaactggcagaagtggcgagcgaatatctgcgtaaaggttctcaggtttatatcgaaggtcagctgcgtacccgtaaatggaccgatcaatccggtcaggatcgctacaccacagaagtcgtggtgaacgttggcggcaccatgcagatgctgggtggtcgtcagggtggtggcgctccggcaggtggcaatatcggtggtggtcagccgcagggcggttggggtcagcctcagcagccgcagggtggcaatcagttcagcggcggcgcgcagtctcgcccgcagcagtccgctccggcagcgccgtctaacgagccgccgatggactttgatgatgacattccgttctgatttgtcattaaaacaataggttatattgttttaaggtggatgattaaagcatctgccagccataaaaaagaagcctccgttatggaggcttctacgtatcaggtcaaaatcattggccattgtggcggtgtctgattcatctcttctatcatcaccgactcgatgttgtgccagatagcggtgatgtccgccattgtgatgccaagcaaccccattgcgaaccaacaggcggaaacaacgcccagaccgctgctgatcaccgcaagcccgacataatcagaccgacgaaaacggatgttgagtgtgctggccagaaacatcattacggcactaagaagttgccagcgaagaagaaccacgccagtggtgagggtagccatcaaacaattcctctgaaaagagccgatgccctggacagcgcggcgttgttcacgggaggcgtggtacactctggctatcgcggggcttgcagaacacaaaaatgaaacactctgtttgtttcattaattttgtgaactatatcacaattgattgtttgttagccatattaggccgtgacttttattgctgtacagattatgtggtttttcagtggcattaagggcatatcttcccgccgcctctgcattcctgtaggaaattaattttgaatatcaatgaattattttcatccaggtgacgattagaaaggtatcaatttcaaatcaggcaaaagtgctatttataccgtaagatttatctaaagacgtcggtacccagggttttcaccttgcaatggccgggtataaacaggcaggaaattgatagcaatgagtcatcgtgcacgacaccaattactggcgttgccgggcattatctttttagttctctttcccatcattctttcgctatggattgccttcctttgggcaaaatcagaagtgaataatcagctccgaacctttgctcaactggcactggataaatccgagctggtcattcgccaggcagatttagtgagcgatgcagctgaacgctatcaggggcaagtttgcactccagcccatcaaaagcgaatgttgaatattattcgtggctatctttatattaatgaattgatctatgcccgtgataaccattttttatgctcatcgctgatagcgcctgtaaacggctatacgattgcaccggccgattataagcgtgaacctaacgtttctatctattattaccgcgatacgccttttttctctggctataaaatgacctatatgcagcggggaaattatgtggcggttatcaaccctctcttctggagtgaagtgatgtctgatgacccgacattgcaatggggtgtgtatgatacggtgacgaaaacctttttctcgttaagcaaagaggcctcggcagcaacgttttctccgctgattcatttgaaggatttaaccgtacaaagaaatggctatttatatgcgacagtttattcgacaaaacgcccaattgcagccattgttgcgacttcatatcaacgtcttataacccatttttataatcatcttatttttgcgttgcccgccggtattttggggagtcttgttctgctattactctggctacgtattcgacaaaactatttatctcccaaacgtaaattgcaacgcgccctcgaaaaacatcaactttgtctttattaccagccaataatcgatatcaaaacagaaaaatgtatcggcgctgaagcgttgttacgttggcctggtgagcaggggcaaataatgaatccggcagagtttattccgctggcagaaaaggaggggatgatagaacagataactgattatgttattgataatgtcttccgcgatctgggcgattacctggcaacacatgcagatcgctatgtttctattaacctgtcggcctccgattttcatacgtcacggttgatagcgcgaatcaatcagaaaacagagcaatacgcggtgcgtccgcagcaaattaaatttgaagtgactgagcatgcatttcttgatgttgacaaaatgacgccgattattctggctttccgccaggcaggttacgaagtggcaattgatgattttggtattggctactctaacttgcataaccttaaatcattgaatgtcgatattttgaaaatcgacaaatcgtttgttgaaacgctgaccacccacaaaaccagtcatttgattgcggaacacatcatcgagctggcgcacagcctggggttaaaaacgatcgctgaaggcgtcgaaactgaggagcaggttaactggctgcgcaaacgcggcgtgcgctattgccagggatggttctttgcgaaggcgatgccgccgcaggtgtttatgcaatggatggagcaattacccgcgcgggagttaacgcgcgggcaataaaattacaggcggtggcgataatcgctgggagtgcgatcaaactgccgacggaaaacgcgggagaaggtctgctgcgagacataacccaggtccattgcgatatcaaaaatcggacgctcggtggtgcgcaactcaacggcggccagtaacaggcggcgttggcgaatgtaatcgccaagcgtctgatgcgtcaccgtgcggaacattcgttgcaagtaccactttgaatagcctgatttttttgcgactacatcaatgttaagcggctggtcaatatgctcgtcaatccatgcgataagatcctgaataattttctgatgggacataaatctgcctcttttcagtgttcagttcgttaattcatctgttggggagtataattcctcaagttaacttgaggtaaagcgatttatggaaaagaaattaccccgcattaaagcgctgctaacccccggcgaagtggcgaaacgcagcggtgtggcggtatcggcgctgcatttctatgaaagtaaagggttgattaccagtatccgtaacagcggcaatcagcggcgatataaacgtgatgtgttgcgatatgttgcaattatcaaaattgctcagcgtattggcattccgctggcgaccattggtgaagcgtttggcgtgttgcccgaagggcatacgttaagtgcgaaagagtggaaacagctttcgtcccaatggcgagaagagttggatcggcgcattcataccttagtggcgctgcgtgacgaactggacggatgtattggttgtggctgcctttcgcgcagtgattgcccgttgcgtaacccgggcgaccgcttaggagaagaaggtaccggcgcacgcttgctggaagatgaacaaaactaaagcgccacaagggcgctttagtttgttttccggtctttgtctttctctctatcccgctggtacacaggagggtttcccccgacgtcaacacacctcattcgagcacgtggtggaggttccggttggtgttgatgctttaattgtatgtcaccgacgtttcttcgccagtgtaaaagtatactttttaaccgcaatatttttgtcatctcagacgattttttatcgcaatcctgaacggtatacggctcgataacgctgcaatcttgcgcaccgacgataacgtttgcgcatcaattgcctggtttttcatcgtcaagacaataaaagagaaaaaagcagcaaacttcggttgaaaaagccgctatgatcgccggataatcgtttgctttttttaccacccgttttgtatgcgcggagctaaacgtttgcttttttgcgacgcagcaaattgtcgcaaacctggagcaggaagataacgtttcgctggcaggggattgtccgccacgcatcttgacgaaaattaaactctcaggggatgttttcttatgtctacgccatcagcgcgtaccggcggttcactcgacgcctggtttaaaatttcacaacgtggaagcactgtccgtcaggaagtggttgccgggttaacaacgtttctggcgatggtctactcggtcatcgtcgttccaggtatgttgggtaaagcaggcttcccgcctgcggcagttttcgttgcaacctgtctggttgccggactcggttctatcgtgatgggtctgtgggctaatctgccgttggcgattggttgcgccatctccctgacagcgtttaccgcattcagcctggtgctggggcaacatattagcgtacctgtcgcgctgggtgccgtgttcctgatgggtgtgctgtttacggtaatttctgccacgggtatccgtagctggattttgcgcaacttgcctcacggtgtggcgcacggcacggggattggtatcggtctgttcctgctgctcattgccgctaacggtgtcggtctggtgattaaaaacccgcttgatggtctgcccgttgcgctgggtgatttcgcgaccttcccggtgattatgtcactggtaggtctggcggtgatcatcggcctggaaaaactgaaagtccctggtggcattctgctgaccattatcggtatctcaattgtcggtttgatcttcgatcctaacgtccatttctccggcgttttcgccatgccttcattgagcgatgaaaacggcaattcactgattggcagcctggacattatgggcgcgctgaatcctgtagtcctgccaagcgttctggcgctggtgatgacggcagtatttgatgccaccggaactatccgtgccgtcgccggccaggcgaacctgctggataaagatgggcagatcatcgacggtgggaaagcactgaccactgactccatgagcagcgttttctctggcctggtgggtgcggctccggcagcggtatacatcgagtctgcggcgggtacggcggcgggcggtaaaaccggtttgacggctatcaccgttggcgtgctgttcctcctgattctgttcctctctccgctctcttacctcgttccggggtatgcaacggctccggcgctgatgtacgttggcctgctgatgctgagcaacgtggcgaaaatcgactttgctgattttgttgatgcgatggcgggtctggttacggctgtattcatcgtgctgacctgtaacatcgtaacaggcatcatgatcggcttcgcgactctggtgattggtcgtctggtttccggcgaatggcgcaagttgaacatcggtacggtcgttatcgccgtggcgctggtgaccttctatgcgggtggctgggctatctaatctttcatcggattctgaaaacgggtggcaatggctgcccgtttttattttctccgcacattgtgtgagcttttgcgatattctgaaaaaaatgagaattcaggcataacgtctttctcagatcataaaaaacatcgcaaacagggaacgcatggaaatcttcttcaccatactgataatgaccctcgtggtctcgctgtccggggtggtcactcgtgtcatgccctttcagatcccgcttccgcttatgcaaatcgccatcggtgcgctactggcgtggccgacgtttggtttgcatgtggagtttgatcctgaactctttttagtcttgtttatcccgccgttgctgttcgctgatggctggaaaacgccgacccgtgaatttctcgaacatggtcgagagattttcggcctcgcgctggcgctggtggtggtcaccgtggtcggcattggcttccttatttactgggtggtgccgggcattccgctgatccctgcctttgcgctggcggcggtgctttctccgaccgatgctgtggcgctctccgggattgttggcgaagggcgcatcccgaaaaaaatcatgggcattttgcagggcgaagcgttgatgaatgacgcctccggtctggtgtcgttgaagtttgccgtagcagtggcgatggggacgatgatcttcaccgtcggcggtgcgacggtcgaatttatgaaagtagccattggcggtattctcgccggttttgtggtgagctggctgtacggtcgctcgctgcgattcctcagccgctggggcggtgatgaacccgcgacgcagatcgtcctgctgttcctgctgccattcgcttcttatctgattgccgaacatattggcgtttccggcatcctcgctgcggttgccgccgggatgaccatcacccgctccggtgtgatgcgccgtgcgccgctggcaatgcgcctgcgtgcaaacagcacctgggcgatgctggaatttgtctttaacggcatggtgttcctgctgttaggtctgcagctgccgggtattctggagacgtcgctgatggcagcagaaatcgaccctaacgtcgaaatctggatgctgtttaccaatattattctgatatatgcggcgctgatgctggtccgtttcggctggctgtggacgatgaaaaagttcagcaaccgcttcctgaagaagaagccgatggagtttggttcgtggaccacacgagaaatcctgatcgcgtctttcgccggggtgcgtggggcgatcactctggccggtgtgctctctatcccgctgctcttgccggatggtaacgtcttcccggcgcgctatgagctggtgttcctggcggctggcgtcattctcttctcgctgtttgtcggcgtggtgatgttgcctattctgctacaacacattgaagtcgcggatcattcgcaacaattgaaagaggaacgtattgcgcgagcggcaacggcagaagtggcgattgtggcgatccagaaaatggaggagcgtctggcggcggataccgaagagaatatcgataaccagctgcttacggaggtcagttctcgcgtcattggtaacctgcgtcgtcgcgccgatggacgtaacgacgttgaaagttccgtgcaggaagagaaccttgagcgtcgcttccgtctggcggcattgcgttctgaacgtgctgaactttaccacctgcgcgccacacgggagatcagcaacgaaacgctgcaaaaattactgcacgatctcgatttgcttgaagcgttgctaattgaggaaaatcagtaagccgaaagcgacgtaaccaggcccgaggtaatctgaaaaaggtgcaatcttttgcacctttaacaggttagctcgggctaacattcatgattctaaaacaaataaattatctctcttttaaagtcaattcattggctgttcttcgacttaacctcaatctgcatcttgcataatatctgcagtaatcttcatagcgactgcatgaagattatcctcagtttgtgacatgccagtatgagtggcacaatcttcttcaaagaatttctgtagtgttaccaggatatcactattaatggagatattttcctcaccacggagaatggtaatacccattccctggacgctagcctcatcgaaattaacacgatagagacggatattaaacatccaggcttttgttaaaacagaacagttgaaatggcaattgcttaaattggcattattaaaattaacattagccatattagagtcggtacatataaccatttcgaggaacgtatttgttaaccgcgtaaaaaagagtttgctatcaattaagtttatattctggagggttgctttattcaggttgacacgagacagatcagcatgttcaaagttaattaaatcaagtttagagaagctaaggtcggctctaaataaattaatatatggcgctattactttataaagatttacctcagccatgtatgccatataaaaatttgaataatcaaggaaggtatttttaatattggctctattcattgttgcattgtagaattgaacatgcatagcggaacatgaatttagagttccgtcagtcatttttatctgagcgaaatttgagtcatcgagaatacaattatcaaaaagtattttttccattatggcgaaattaaaattcgttttatacatattacagtcctgaaaaatagcgttttgtagtctgcaacctgcaaaattcgaattggataaatcttcatctttaatcacgatacctttcaggctaaggtgtgaaaaatcgtaaccaccatttactgtctgtgggatttcgatagtattattatggacggtgacattatttataaaatataccaccttaattgacacttccttatctttattaaggtaaactcttctcgtaattctatcgtcacatttattatttgcatgtgaagctatatctataaaatatttatgtattttcctgtccgtttctttcgtgatttttcctgatggtaaactatcataaattcttttcattttctgaatcaagcctatcactttttcatgatcatccattttgaaaagagagagggctttattgtcaattaacgtgtttttatgatgtttgctgtaattatctgattttgttttctttgtatgtgatggacttgtgacagagtggttatcgttaatcaggcaaagagggaaaaacatattatttaaaccattatagcgcataaaatatccttataattaacaagaaagaaaaggcatattctctgcattatcattttctacgactgtcaaaaatcgctcattttttaatgagtttatttgtttaatattatgggaaaaggtgatgcatttgggagaggaagagtattccccggtcagacgaccggggaaggggagagattaatgcgcgcggccttgctcaacgccaaagccggtctgggagcggataaactgcgcgcggaacagttcacgctcacgcgcgccttccgctgagttatcggttgccgagaagaaccagatgccgaggaatgccacggtgatagagaacagcgccgggtattcatacgggaagatggctttttcgtgaccaaggatctgtacccaaatcgtcgggccgaggatcatcagtactactgcggtaatcagccccagccagccacccatcatcgcgccacgcgtggtcagtttcgaccagtacatagaaagcagaatgatcgggaagttacagctcgccgcgatggcaaacgccagccccaccataaaggcgatgttctgattctcaaacagcacgccgaggataatcgcaatcacgccgaggatcagtacggtgatttttgatacccgcagctcttcacgttcggtcgcgccttttttgaagacgttagcgtacaagtcatgcgaaaccgcggatgcgcccgccagcgtcagacccgcaaccaccgcgaggatagtggcgaaagcaaccgctgaaataaaaccgaggaacaggttgccgcccactgcattcgccaggtgaacggccgccatgttgttaccaccaatcagatggcccgccgcgtctttatattccggattcgcaccaaccagcatgatcgcgccgaagccgataataaaggtcagaatatagaagtagcccataaacccggtggcgtagaacacgctcttacgtgcttcgcgggcatcgctgactgtaaagaagcgcatcagaatgtgcggcaagcccgccgtaccaaacatcagtcccagacccagagagagcgcggagatcggatctttcaccagcccgcccggcttcatgatgtcgacacctttcgggtgtaccgccatcgcttcactgaacagattgttgaagctaaagccgacgtgtttcatcaccataaaggccataaagctggcaccgaacagcaacagcacggctttgataatttgcacccaggtggtcgccagcatgccgccgaacaggacgtacatcatcatcagcacgccgaccagcaccaccgcaatgtgatagttaaggccaaacagcagctcgatcagtttacctgcgcccaccatctgggcgataaggtaaagcgccaccaccaccagagaaccacaggccgaaagaatacgaatcggcccttgtttcagacggtaagaggccacatcggcaaaggtgtagcgccccaggttacgcagacgttcggcaatcaggaacaaaatgatcggccagcccaccaggaagcccagcgagtaaattaagccgtcatagccggaggtaaacaccagcgcggagatccccaagaatgaggcggcggacatatagtccccggcaatcgccagcccgttctggaagccagtgatattgccgcctgcggtgtagtagtcgctacgagaacgtacgcgttttgatgcccagtaggtaatgccgagcgtaaacacgacgaaaatcaggaacataataatcgcctgccagttcgttggctggcgctctacggccccgctaatagcatccgcggcgttagctgcgaaagggagtgtggcggcaagcgccgtcagaactcttttcatgatgcttgtacctcatgcaggacttcattattaagacggtcgaattcgccgttcgcccgccagatgtagataccggtgagaacaaaggagatcacaatcactccaacaccaattggaataccgcgtgtgacgctggtgttcggattcagcggcgtgcccagccagccgggcgcgaaggcgatcagtaaaataaagccgatataaactgccagcataataatcgacaggatggtggcaaaccgttgccgtttttcgactaactccctgaaatgcgcattgtcttctatccgctgataaatagtgccattcatcacagattctccagaggtaatgtagggattgttttaattcccgctcccttatgggagaaggttaacgctcgggtaacccttgccgaatgtaggccggataaggcgtttacgccgcatccggcaatcaatgcctgatgcgacgctgtcgcgtcttatcaggcctacaaaccgttaccgactcgcatcgggcaattgtgggttacgatggcatcgcgatagcctgcttctcttcaagcagcttctcgactacgccaggatcggcaagcgtcgaggtatcgcccaggttgctggtatcgcccgccgcaattttgcgcagaatacggcgcataattttgccggagcgggttttaggcagggagtcggtccagtgcagcacgtctggcgtcgccagcgggccaatctctttacgcacccagttgcggacttctgcgtacagttctggtgacggttcctccccgtgattaagcgtgacgtaggcgtagatcgcctgacctttaatattgtgcggaatacctactacggcggcttcggcaatcttcggatgcgccaccagcgccgactcaatctctgccgtccccagacggtgaccggagacgttcagcacgtcgtccacacgcccggttatccagtaatagccatcttcatcgcgacgcgcgccgtcgccgctgaaatacatatttttgaaggtggagaagtaggtctgttcaaaacgttcgtgatcgccaaacagcgtacgcgcctgacccggccaggagtcggtgattaccaggctaccttcggtggccccctccagcgggttaccttcgttatcgaccagcgccggttgcacgccgaagaacggacgtgttgccgaaccggctttcagctcggtagcgccaggcagcggggtgatcatgaaaccgccggtttcggtctgccaccaggtatcgaccaccggacatttctcgttgccgatttttttccagtaccactcccacgcttccgggttaattggctcgcccacggaaccgagaatgcgcagcgacgaacggtcggtgccttcgatcgctttatcgccttccgccatcagcgcgcggatcgccgtgggtgcggtatagagaatattgacctgatgcttgtccaccacctgcgccatacgggcaggcgtcggccagttgggtacgccttcaaacatcagcgtggtcgcaccgcaggccagcgggccgtacagcaagtaactgtgtccggtcacccagcccacatcggcggtgcaccagtagatatcacccggatgataatcaaagacatatttaaaggtcagcgccgcgtacaccagataaccgccggtagtatgcagcacaccttttggcttaccggtagaaccggaggtgtagagaataaacagcggatcttcggcgttcatctcttccgcctggtgctgatcgctcgcttgctcaaccaggtcgtgccaccacaggtcgcgcccttcctgccagtcaattttcccgccagtacgcttcagtaccaccacatgctctacgctggtgacgttcgggtttttcagcgcgtcatcaacgtttttcttcagcggaatactgcgcccggcacgcacaccttcgtcggaagtgatcaccagtcgtgagttggaatcaataatgcgcccggcaacggcttccggcgagaagccgccgaaaatcaccgaatgcaccgcgccaatgcgggcgcaggccagcatcgcaaccgcggcttccggcaccatcggcatataaatcgccaccacatcaccttttttaatgcccagctcgagcagggtattggcgaagcggcagacgtcgcggtgcagctctttatagctgatatgtttgctctggctggcgtcgtcgccttcccagatgatggcggtacgatcgccgttttcttgcagatggcggtcaaggcagtttgccgccagattcagcgtgccgtcctcgtaccatttaatggacacattaccgggggcaaaggaggtgtttttcaccttctggtaaggtttgatccagtcaagaatttttccctgttcgccccagaaggtatcaggtacgttaatagattgttgatacatcgcctcgtactgctgagggtttatcaggcaacggtctgcgatgttggcaggaatggtgtgtttgtgaatttggctcatgcttttgttctccttgtaggatgttaataatatgtggcataagcgttaaatgtaggggtattggcagttttgtttagtatttgggcgacagatcacgcaaaagtagaattgtgcaaataaacggcagggtaatttttgaaggtcagcaacaaaagttgattaattctttgaggaacatgcagttatgcatgctgttgaaaaagaggaagatactgactaactctaaagtggtattttacatgcacttacaattgattaaagacaacattcacagtgtggttatttgttacacataggggcgagcaatgtcatgacagtgtaggtgcggttactgtcgtgaaaaacaataaaaaccgccattgcaacaatggcgcaattcggatgaagcccctatgacaaggataaaaataaacgcacgccgtatcttcagcttattgattccttttttctttttcacttctgttcacgctgaacaaacggctgctcccgcaaaacctgtaactgtggaagcgaagaatgaaacctttgccccgcagcatcccgatcaatatctctcctggaaagccacctcggaacagtcagagcgtgttgacgccctggcggaagatccacggctggtgatcctgtgggcggggtatcccttctcgcgcgattacaacaagccgcgtggacatgcttttgctgtgaccgatgtgcgtgaaaccctgcgtaccggtgcgccgaaaaacgctgaagatggtccgctaccgatggcatgctggagttgtaaaagcccggatgtggcgcgtctgatccagaaagacggcgaagatggctacttccacggtaaatgggcgcgcggcggtccggaaatcgtcaacaacttaggttgtgccgattgccataacaccgcctctccagagttcgccaaaggcaaaccggagttaaccctttcccgtccgtatgcggctcgcgcgatggaagccattggtaaaccttttgagaaagccggacgtttcgaccagcaatcgatggtttgcggtcagtgccatgtggagtattacttcgacggcaaaaacaaagcggttaaattcccgtgggatgacggcatgaaagtcgaaaatatggagcagtattacgacaaaattgccttctctgactggactaactccctgtcgaaaacgccaatgctgaaagcgcagcacccggaatatgaaacctggacagcgggcattcacggtaaaaacaacgtgacctgtatcgactgccatatgccaaaagtgcagaacgccgaaggcaaactctacaccgaccataaaattggtaatccgtttgataacttcgcccagacttgtgcgaactgccatacccaggacaaagctgccttgcaaaaagtggtcgcggaacgtaagcagtcgattaacgacctgaaaatcaaggttgaagatcaactggttcacgctcacttcgaagcgaaagcagcgctggatgcaggcgcgacggaagctgaaatgaagccaattcaggacgatatccgtcatgcccagtggcgctgggatctggcgatcgcttcccacggcattcatatgcacgcaccggaagaaggtttacggatgctcggtacggcgatggataaagcggcggatgcacgcaccaaactggcgcgcctgctggcgaccaaaggcatcacccatgaaatccagatcccggatatctcaaccaaagagaaagcccagcaggccattggcctgaacatggaacaaatcaaggccgagaagcaggacttcatcaaaacggtgatcccgcagtgggaagaacaggcacgtaaaaacggtctgttaagccaataaccccgttccgcctcgcaaggggcggaaaacacaatggagtgaatatgagcgtattacgttcgttattaactgccggggtgctggcgtcgggcctgttgtggagcctgaacggaattaccgctacccctgcggcgcaggcatctgatgatcgctacgaagttacccagcagcgtaacccggatgccgcctgtctggactgtcataaaccagataccgaaggtatgcatggaaaacatgcttccgttatcaacccgaataacaaactgccggtcacctgcaccaactgtcacggccagccatcaccgcaacaccgcgaaggggtgaaagatgtgatgcgctttaacgagccgatgtacaaggttggagagcagaacagcgtctgtatgtcctgtcatctgccggaacagttgcaaaaagcgttctggccgcackatgtccacgtaaccaaagtggcgtgcgccagctgccattccctgcatccacagcaagatacgatgcagacgttaagtgacaaaggacggattaagatttgcgtcgattgccacagcgatcagcgcaccaatccgaactttaacccggcgtctgttccgttgcttaaggagcagccatgacctggtctcgtcgccagtttctcaccggcgtcggcgtgctggcagccgtcagcggcaccgcagggcgcgtggtggcgaaaacgttgaatatcaatggggtgcgttacggcatggtgcatgacgagtcgttatgcatcggctgtaccgcctgtatggatgcttgtcgggaagtgaacaaggtgccggaaggcgtctcgcgcctgacgattattcgtagcgagccgcagggcgaatttcctgatgtgaaatatcgcttcttccgtaagtcttgccagcactgcgatcatgcgccgtgcgttgacgtctgcccgaccggtgcgtcttttcgcgatgctgccagtgggattgtcgatgttaatccggatctctgcgtcggttgtcagtactgcatcgccgcctgtccgtaccgcgtgcgctttatccatccggtcacgaagacggcggacaaatgcgatttctgccgtaagaccaatttgcaggccggtaagttgcccgcgtgcgttgaagcttgcccgaccaaggcgctgacgtttggcaatctggacgatcccaacagtgagatttcgcaactgctgcgccagaagcccacttaccgctacaagctggcgctgggaaccaaaccgaagctgtaccgcgtaccgtttaaatacggggaggtgagccaatgacgcagacttccgcatttcattttgaatcgctggtgtgggactggccgattgccatctacctgtttttgattggtatttctgctggtctggtgacgctggccgtgctgttacgtcgcttctacccgcaggcgggcggtgcagacagtacgttgctgcgcaccacgctgattgtcgggccgggcgcggtgatcctcggtctgttgatcctcgtcttccacctgacaagaccgtggaccttctggaagctgatgttccactacagttttacctcggtgatgtcgatgggggtgatgctgtttcagctctacatggtggtgctggtgctgtggctggcgaaaatctttgaacatgatttgcttgccctgcaacaacgctggttgccgaagctggggatcgtgcaaaaggttctgagcctgctgacgcccgttcatcgcggactggaaacattgatgctggtgctggcggtgttgttgggggcttataccggctttctgctgtcggcgctgaaatcgtatccgttcctcaataacccgatcctgccggtgctgttcctcttctccggcatctcgtccggtgcggcggtggcgctgatcgccatggcgatacgccaacgcagtaacccgcattccacggaagcgcagtttgtacaccgtatggaaatccctgtggtatggggtgaaatcttcctgctggtggcgttttttgtcggtctggcgctgggcgatgacggtaaagttcgtgcgctggtggcggcattaggtggcggtttctggacgtggtggttctggcttggtgtcgccgggctggggctgattgtgccaatgctgctcaaaccgtgggtcaatcgcagttccggcattcctgccgtgctggcggcgtgtggggccagtctggtcggcgtgttgatgctgcgctttttcattctctacgccggacagttgacggtggcgtaagccagaaaagaggtggtttctggacgtattccttcctgaagtcggttttctggcgttgttgttaagtctcggggtcaacgtgttgaccccgttgacggccttcgcgggagtgcggttgcgctggcctgccatgatgcgactcacttgcatcggcattctggcgcagttcgcgctcctgctgctcgcctttggcgtactgacgtattgttttctcatcagcgatttctcggtcatttatgtcgcgcaacatagctatagcctgctgtcgtgggaactcaagctggcagcggtgtggggcggccatgaaggttcgctgctgctttgggtgctgctgctttccgcctggagcgcgctgtttgcctggcattatcggcagcaaaccgatccgctatttccgctgacgttagccgttttatctctcatgctcgccgcactgctactgtttgtggtgctgtggtccgatcccttcgtgcggatatttccaccagcaatcgaaggccgcgatctcaatccgatgctgcaacatcccggtcttatctttcatccaccgctgctttaccttggctatggcggtttgatggtagcggcgagcgtggcgctggcgagtctactgcgcggcgagtttgatggtgcctgcgcccgaatttgctggcgctgggcgttacctggctggagtgcattaacggcggggatcatcctcggttcctggtgggcctactgcgaactcggctggggcggctggtggttctgggatccggtggaaaacgcctctttattaccctggctttctgccactgcgctgctgcacagtttgtccctgacacgccagcgggggattttttgccactggtcgctgttgctggcgatagttactctgatgctgtcgctgctgggcaccttaattgtccgttctggcattctggtttcggttcatgcgttcgcgctggataacgtccgcgccgtgccgttgttcagcctgtttgcactgattagccttgcgtctctggctctgtatggctggcgagcgcgggacggtggcccggcggtgcatttttcggggttatcgcgggaaatgttaatcctcgctacgctgttgctgttttgcgcagtgctactgatcgtgctggtgggaacgctttatccgatgatttacggcctgctgggctggggacgcctctccgttggcgcgccgtattttaaccgcgcgacgttaccgtttggtctgttgatgctggtggtgattgtgctggcgacgtttgtctctggcaaacgcgtgcagcttccggcgctggtagctcatgcgggcgtgctgttatttgccgctggggtcgtggtctccagcgtcagccgtcaggagatcagcctgaatttacagccgggtcagcaggtgacgctggcaggatacaccttccgttttgagtgcctcgatctacaagccaaaggcaattacaccagcgaaaaagcgatagtggcactgtttgaccatcagcaacgcattggtgaactgacgccggagcggcgtttttatgaagcacgccgtcaacaaatgatggaaccgtcaattcgctggaacggcatccatgactggtatgcggtcatgggggagaaaactgggccggatcgttacgcttttcgtttgtatgtacaaagcggtgtgcgctggatctgggggggaggattgttgatgattgcgggcgcattgttaagcggatggcgggggaagaagcgcgatgaataaagggcttctcacgctactgctgttatttacctgttttgcgcacgctcaggtcgtagacacctggcaattcgccaatccgcaacaacagcaacaggcgttaaatattgccagccagttacgttgtccgcagtgccagaatcaaaacttactggaatccaacgcgccggtggctgtcagtatgcgccatcaggtttacagcatggtggcggaggggaagaacgaagtcgaaatcattggctggatgaccgaacgctacggagattttgttcgctataacccaccgttaacgggtcagacgctggtgttatgggcgctgccagtggtgttgttactgctgatggcactgatcctctggcgagtgagggcgaagcgatgaaacagcccaaaataccggtgaaaatgctgacaacactcacgatattgatggtatttctctgtgtcggcagttatctgttaagcccaaaatggcaggcggtacgtgcggagtatcagcgtcagcgcgatccgctacatcagtttgccagccagcaaaccccggaagcgcagcttcaggcattgcaggataaaatccgcgctaatccacaaaacagcgaacagtgggcgttactgggcgagtactatctgtggcaaaacgattacagcaattcgttgctggcgtaccgtcaggcgttgcaactacgtggtgagaacgctgaactgtatgcggcgctggcgacggtgctttattaccaggccagccagcatatgaccgcccagactcgcgcaatgatcgacaaagccctcgcgctggacagtaatgaaatcaccgccctgatgctgctggcttccgatgcgtttatgcaggcgaactacgcgcaagccatcgaactatggcaaaaagtgatggatctcaactcaccgcgagttaaccgaacacagctggttgagtcgattaatatggcgaaattgttgcagcggagattggattaatcatctggtgatgaagattatgtcattgagctgcataaaaaataatcgaatgaacatatgccaaaaataatcactaatcagtattattgcagattaaacaaataaaaatctttccataacaaatggttattcattaatcctgccataaactcgcgttattatgcattaatgcagcgaaaagctctgttgttaaagggttgcgcaacataccgcgcaaatgatactgatcataagcgttaaaaaaatctacaaaccaacgcaacacaattcatgccctggcagtatgtcacgttctcgcgtttctgaacggggaacggcgctccattgaggaagtcattcatatgaaaaatataaaattcagcctggcctggcagattctgtttgctatggtgctgggcattctcctgggaagctacctgcactaccatagcgacagccgcgactggctggtcgtcaatttgctctctccggcgggtgatatcttcatccatctgattaaaatgattgttgtgccgattgtgatctccacgctggtggtgggtatcgcgggtgttggtgatgccaaacagctcgggcgtattggcgcgaaaaccattatctacttcgaggtgatcaccaccgtcgccatcattttggggatcactctggcgaacgtcttccagcccggtgccggggtggatatgtcgcagttggcgaccgtcgatatctcgaaatatcagagcactacggaagcggtacaaagcagttcccacggcattatgggcacgattttgtcgctggtgccgacgaacattgtggcgtcgatggcgaaaggcgaaatgctgccgatcatctttttctcggtgctgtttggtctggggctttcttccctgcccgcgacgcatcgtgaaccgctggtgaccgtgttccgctccatctctgaaaccatgtttaaagtgactcacatggtgatgcgttatgcaccggtgggtgtgtttgcgctgattgcggtgacggtggctaactttggtttctcgtctctgtggccactggcgaaactggtgctgctggtgcatttcgccattctgttcttcgcgctggtagtgctgggaattgtggcgcgcctgtgcgggttaagcgtctggatcctgattcgtattctgaaagatgagctgattctggcgtactccactgccagctctgaaagcgtgctgccgcgaattattgagaagatggaagcctacggagcaccggtgtcgatcaccagtttcgtggtgccgaccggttactcttttaaccttgatggttcgacgctgtatcaaagtattgccgctatcttcatcgcgcagttgtatggcattgacctgtccatctggcaggaaatcattctggtgctgacgctgatggtgacctcgaaagggattgctggcgtgcctggcgtgtcgtttgtggtgttgctggcaacgctgggtagcgtaggtattccgctggaaggtctggcgtttattgctggtgttgaccgtatcctcgacatggcgcgtactgcgctgaacgtggtgggtaatgcgctggcggtgctggtgattgccaagtgggaacacaaatttgaccgtaagaaagcgctggcttatgagcgtgaagtgctgggcaaatttgataaaactgcggatcaataattgaagattgccggggatatccacccggcaatgtgtgaatgcctgatgcgacgcttgccgcgtcttatcaggcctacgccagacagcgcaatagcctgatttagcgtgattttgtaggtcggataaggcgtttatgccgcatccgacatcaacgcctgatgcgacgcttaacgcgtcttatcaggcctacgccagacagcgcaatagcctgatttagcgtgattttgtaggtcggataaggcgtttacgccgcatccgacatcaacgcctgatgcgacgcttgccgcgtcttatcaggcctacgccagacagcgcaatagcctgatttagcgtgattttgtaggtcggataaggcgtttatgccgcatccgacatcaacgcctgatgcgacgcttaacgcgtcttatcaggcctacgccagacagcgcaatagcctgatttagcgtgattttgtaggtcggataaggcgtttacgccgcatccgacatcaatgcctgatgcgacgcttgccgcgtcttatcaggcctatcttaaccgttggttaatttttcaaactcttcacacccggtatcaaacccttccatacagctcaggttcaaccagtgcagcgccttttgcttgttcttctcgataaaaccttcttcaccgtttaagaacatcattcccgcccagtactcggaataaccggttcgggaaattgcagagctgcgtttgaaataccaggttgccttgtcatcgtcggccttaatgcccacgccgttggcgtaaatcaaaccaagcagcatttgggcatcgacggcagagtcgttctccagatcttccgaggcgttttctaacagcgaaattgcctttggataatccggtttacccgcttgagtatttaccagaatatgcgccagcgttacttcaccttctttactgcccgcttgcgccgctttctctgcaagaacttttgcttgtggatagtccagactgaccggattggtgattttgatctgcgccagcagcgcgcaggcatcagcatcaccgctgtcggcggctttctgtgcccaatattcggctttgctcaaatcgccggagctaaaccagctgtcggcaagaaaatattgtgcgcgtcggtccccggcctctgctgcctttaaatactggctgccaggctcggagtcgttggcgtgggcaaagaatgtcaaaaacaacatcaatgcgataatttttttcattttgataatacgattgggtagggagtaaccagtataaagagttcgaatggataaaaaaacagcctccgaaaggaggctgtagaaaggacggtattacgccagtgccgcttcgcgcaggcgagttttcaacttgttgtactcgtcaatcacgtactgctcggcggcgcgctgatcggcgatcggctcgacgcgaacggcgcagtatttgtactccggcgttttcgtaatcgggcttaagttttcggtaaccagctcgttacaggcaccaatccaccactggtaggtcatgtaaatcgcccctttgttcggacgatcgctgacctgcgcacgggtgataattttgcctttacgcgagtgcacccaaaccaatgcctcatcttcaatacccagacgtttggcgtcttcggtattgatttgtgcgtagccaggttcatcagccagcgccgccagtgccgcacagttaccggtcatcgaacggcaagagtagtgaccaacttcacgcaccgttgacagtaccatcgggtactcgtcggtgagtttgtcgattggcgctacccagtcgcaggtgaagaactgcgccagaccgttcggggtatcaaacttctctttaaacagataagaagtcccctgatcggcatctgaagtatcgcggcaaggccactgaatgaagcccagttcgcccattttctcgtaagtcgcaccgtagaaatccgggcacagatgacgcaactcatcccagatctcctgggtgttgttgtagtgcatcggataacccatacgggtggcgatttcactgatgatttgccagtccgttttcagatcccatttcggttcaaccgccttgaagaaacgctggaagccacggtcagccgcagtaaacacgccttcatgctcgccccacgacgttgacggtaaaataacatccgccgccgacgcggttttggtcataaagatgtcctgaacgataaccagttccagatcttcaaaggctttacgtactgccgacagctccgcgtcagtttgtagcggatcttcgcccataatgtacgcggcacgcacttcgccatgcgctgcgcggtgcggcagctcgctgatgcgatagccggtatgcgctggcaggctttccacgccccaggctttggcgaatttctcgcggttagccggatctttcacgtactggtatcccggatacgtatccggcagcgcgcccatatcgcaggcaccctgaacgttgttctgaccacgaaccgggttaacacccgcatgcggcttaccgaggttaccggtcagcatcgcgaggctggtcagagaacgcacggtttccacgccctggtagaactgggttacacccatgccccacaggatggcggcgcttttcgcctgggcatacatccgtgccgcctgacgaatctcactggcgctgacgccggtgatatcttcaaccgactccggcgtgtagccttcaacgattttacgatactcttcaaagccttctgtacgtgaagcgacgaacgctttgtcgtacagattttcttcaataatgacatggcccatcgcattcaacagcgcgatgttcgagccgtttttcagtgcaatgtgcatgtcagcaatgcgcgcggtttcaattttgcgcggatcgcagacgataattttcgccccgttacgtttagcgttaattacgtgattcgccacgattgggtgggaatccgccgggttgtacccgaaaacgaacactaaatcggtattatcaatttcgttaatagcattgctcattgcgccattaccgaccgattggtgcagacctgcaaccgatgggccgtgtcagacacgagcgcagcagtcaacgttattggtaccaataacggcgcgcgcaaatttttgcattacatagttggtttcgttacccgtaccacgcgaggagccggtcgtctggatggcatccggaccgtacttctctttgatggcgctcaggcgctcggcaacgtaattcagtgcctcatcccaggaaacaggttcgagtttgccgccacgctggcgacggatcatgggggttttcaggcgcggggtcaggatctgggtatcgttaatgaagtcccagccataataacccttcagacacagggtaccctggttggttttcccctgcgctgcctccgcccggacgattttgccgttatcgacgaccaggttgattttgcaacctgatgcgcaataggggcaaaccgtgacgacttttttcatcggtctcgctccagttaatcaaatcacgcatacgcgctctcgactacagtatgcatcttttatgccacattttatgtggggtcattccctgatattacgggcactatttattcaaaactctgacgaaaaacaggctgtcgtcagttttgacgtgacgaaacgaaataccgcgtgacagccatcacgcggcagacattttattttttctcgacgacgggacctgcctgatacccgccgcccagcgatttcatcaactgaatgctttggatcacccggcggctgtccagcatcagtaatgacatctcttcggcaagcactggcaaccgggcttcggtggcctgtaagcggctggttaagccgcgctgataggcggcctcggcagcgcgctgggtaaagcgcgtggcttccacgcgttcagcctgcatttctcgctcgtcgttgagcgtttgcagacgcgtgccgttgacggcaacgtcacgcaccgcgttcagtactgactggttgtaacgttcaatcatcatgttgctggcggcgcgcgtgccttcgagattggcattcaaccgtccaccgtcaaacagcggcaatttcagacccgggatgaagttgaactggcgactggtttttttgaataaggtatgcagatggatggagtccagaccgaaaaacgctttgatatcaaagctcggatagaacaacgcccgcgcggaatccacctgatctaatgacgcctgaacataccagcgcatggcttgcagatccgggcgtctggcgagcaactcataagagagtgtcgccggaatgccggtctggacttgcggtaatgccaccggtctgatctccggcatatcgctggctcccgcgccaatcaatgcacgcagagattctcgcgtttcggtgatttgccctttgacggcaacaatttgtttatcgaccgccagaatctgtgcccgcgcgccgtggaaaggcacttgcgcttccagaccgtgcgccactttactctggtgcgctttcaccgcgtaatcaatcacatcgtgagtttgttctaacagatcgagcatctgatagctggcctgcatactgtaataaagctgcgctacgcccgtggccagcgatagctctactgctgcggtttctgccagcgcggcattatgcgcgccaatggcggcggcaaccgctgagcgatgcacaccccacaaatcaagatccagtccggcaaacaaacctactgtggcttccgtatagtacggcccgtccatacccagtgctggcgcatccattgaataagggcttaaaaagccgttcgccgagacacgttggcggttgagcatccctaacgctgcgacctgtaattgtgaaccggcatctaacaaatcggcctgggactgcgctttttcttcccgcagtttcgcttcggcgagggtgtgtgaaccacttagcgtccgttggatcagcgcatccagctgcgggtcattgagttgtttccaccactgcgcctgcggccagccggagctggcaagatgaatatcgtcggccagtttgatttgttccggtttgagctgttgatgaggtgcagaatccttacgtaccagggcacagccggaaatcagcgtcgtgctgccgagaatgctgcacaacagcagacgtgaaagttgacgattgatcattgcgtggctccttgtgcctgttccgtggcgggcgttaatgccggggctgtccagtctggcaagcgggcgaaaagctggcagacgtgttgctcctgttttaataaggtgggcaggatggcctgagaggcgggtgtctcttcaagcgttatttgaggagaacggctgagtgcggttgccagaccggcagcgtatttctccagggcgtcggcaaactgacctgctctgtccggctgtagtgcgttatccagcgcctgcgccgagttccaggtggcatcccaggcgtgaagaagatcgcggccctgacgaataaccgtttgcgaacgttcaatcagtaatgcgcgttcttcgctgtccagttgacgctccagcgccacgcgttggcacatctcttcacaggcattaaacgccgcatgcagaccgatacgaatttgcagataagtgcgcagagccgtgacttcctgctggcgtgggatccgcattactttacttaacatacccagcgtgccagccagtttttgcggcagtgtgcgcgcttcactttcaggccagacaaaggtgtaaatcaccgcggacaccacggtaccaatgatgatacccagggcgcgatcgcgaatttccaccaggtcgtacactgggccaaaaacgttttcgagcgtggcgagcgcgaaggtgaccaccatctgtgtgccgatataagaagagcgttcagagctggtggcaatccatgcgcccaacaggaaaatcggtgccagcacaaacagcaattcgacaatattgtccagccagggcatgaccagtagcgtgaataacagcgccagaatcgcgccgcaaaaggccccgccaaaacgcagcaccatcttctggtacgacgaaccgacatttgggttagcgacgatcacgcatgtcagcatacaggtgtgaatgccttcccagtccacgccgctgtaaaaggtgtaacagatcaaacaggcgagcagcgtttttaccgcgtagcgcatatagtctggattggtaaaagcatcggcggccattgatggcggtttggctgcgggcgttggcggcgtattcgggtccatctgacccagttgtaacaacgtctggcagatattctccaggttacattcccgtgccgccatcgcttcactttcactgatccgccagtcgctttgccagcactgaccttcagcaacggcatgctgcagcttgttgatttctgaagctaatttttgtcggaattcaataattgcctgagaatcagcaaaagaggtgggatcgtagcgattcagcgtcgagtaaatgtaggttaccgttgccacgcagctttgccaccatgcgttttgagttcgccagttggcatcgtccgcgaggcaaaagacattgagtttttgtagcgccagcgcctctctttcaatccgcgtttcgggtagcggtgcgaggctgtctgtcaggtgactaatggcatcatcaagccgatcattaagcgcctgatgcatttgcgaaatggcacgactgggaaaccacagcacgccgattaacgtcatcagcaaggttggatagaggccaacaacgatacaccacagcgttaagcgcacgaccacttccggatagtcgagcatggcggggaaggtttgcccgtaaatagcgacaatggcgacggcgaaaaagaccagccccaagcgatgggtgcgcatcaaaaacatgcagcccatcaggatcggtccggcgatgatcaatcggatcaacggttcgccgtatgaccatttgtagatcaaaaacaggctgccgatctccagcaccgtggcaaccacaaacaagatcgcgacaaatttggtgtaaaacgcgttcgactgaataccgtaaaacagcactgccagcgataacgccacaaaagggatctcaaaggtcatcgagatcagaatcaccagcaggcagcctacccagagttgcacggtctgcggcacgcgacctggtcgttattattaattctcgcttaactcttcatgaaagaacgccagcagcctgaccaccggtaatggcagggagttgagcgcgctcattattgcggctcaagattagcgactgccgaagcgccgatgcggaacatttccgggtcaggtttatcgaccatgattttgaccggaaaacgctgggcaacgcggacccagttaatagaacgagacactttcggcaggccgcccagcaccaggccgccgtcatccggtagcacgccgtagccaatcgaatccactttaccctcgaaggttttgccgctgtcactcatcaggcgaatcgttgcgggtgtacctgagcgaatatttttcagatcggtttcgcggaagttggcgatcacataccagtgacgagtgtcgattagggtaaaaatagggcgcatggcagaagcaaattgcccgacggaggttttgagggaaatgacccggccatcaaacggcgcgcgaacggtcgccatttccagatgcagtttggtcagggcaatatccgcttcgaccgccgcacgctgggcaactaatgcatccacgccgctgacggcgctggcggctgactgcgcctgtaacaatacggcattaagatccgcttctgcggcgcgctgcgccgttcttgcacggtcaacatcttccgctgagacaaaaccttctttcagtaatggctcggtgcggcgtaatgtatctgtggcctgtttcgcggcggcacgggctttttctaccgtggcattaaccgagtcggcaccaaactgttgcgcgtcaacgctacgctgggtgagcataatttgcttatccagcgccgcgagggaggcttcagctttcgccagattggcttcgtacgggcgcgggtcgatgcggaacagcaaatcgccctgtttgactgcctggttgtcggtgaccgccagttctacaatgcggccgctgacttccggtaccacatcaatggtatctgctgacgcgtaagcgtcattagttgatggcgcactgtctacgcgccagataacgaaaacaagggcaaccagcgccaacgcaaccactaacagagcagggaatttactgcgaggagcttttttcggcgtactttccatgagcgcgtctcaaatagattagaaaaatgccagccagaacagcatggcgtagagagcaaaaagggcggtataaataattccgacaaatgccagattgatatttgcccgctgaataactcgcctcgtgatgagcgtcaaaataaggctggcaatggcgcagaaaaaccagctgggataataagcgccgatcaccgggattgccggagataatgagcatcccgaaaccatgaagacgggaattatccaggctgtttttttgagttgcatcgccatgcgagagagaactgttggcatattaaatacatcctgtctgctgcgaacaatatctgtagtgaatatcaatatccattgaaggcgtcagtatggctattttcttgatgaataaaaatagctttattcagccaccgcattcataacttatatattttatttattaattggctgtatatatttttaaaataaatacttttgggggcttcagcgcccccaaaagcgagtgacattaatttggggttacgatattcacccacaaatcgaaattatccagacaggcgataatttcttccagtttcgcgccattgccaataattttggctttcttcgcttttaccagatccgccattttggcttgtccggtcagcacggcgtgcagatcttcacggctgatgtagaaagaggcgtcggcttgcggttgcagcgttttccggtagttaagcacgctatcgttcagcgtcaggttgaggttatcgccgttgctcatattgaagttcaggctgatatttttacccgcagctttcgcgctatcgaggcgaacggccataaagtcgaacagcatttcgaccgacatcccgcgaatggtgtccggggaaccggtggtgccgtggctgaacttatgcaccccttcgcgcagctctttcgcgccggtcaggtagaaaccgcgccatgtggcggactcggcctgatagcccagctgttcaaagttattcgcttgcagattcttcgcgacctggtcacccgggttggcggcaatcacctgtttcagcagttctgccgaccagcggtaatcaccttgcttgttcgcttcttgcgccaggttgatgacacgggcagaaccgcccagcgcctgcacgtaacgtttacccatctccacctgaccatacggatgcaggttagccgggttaccgtcgtaatagccaagatagaagttatacaccgcgcgggcgttgtggctgacagaaccgtaatagccgcggctggcccagttattggcaagtgcaggcggcagcttaatcatgtcgccgatttcattcatggtgtagccctggttcgccaggtgcagggtctggtcgtgaatgtacttgatggtatcgcggtatttaccaatataatcattgatatgcttattgccccagaccggccaggtgtgcggcataaacagcacttccgcgtcgttaccccacatatccagcgtttcgttcagatactcggtccacttgctggtgtcgcgggttttcgcgccgcgcagagtgtagaagttgtgcagggtatgcgtggcgttctcggcggtacacagggctttcagggccggaatatagaagtgcatttcggctggcgcttcgctacctggggtcatcaggaagtcaaactccaggccgtcgataatcatcttctcgccagttctgacgatagttttcgtcggtgcaataatgctcgggtcgcccgttgccagcgtcacgccaaggccattacccacattgccttgcgcgttgtgcggcagtaacagaccgtaagagtagagcgcacggcggctcatgatgttacccgccagcacgttttcgctgatggcttcgtccataaagcctgcaggggcaatcacctgaactttgccggatttaacatcggcttcagagataatgcctttcacgccaccatagtggtcggtgtggctgtgagtgtagataacggcaacaatcggtttttgcggacgatgctggaagtaaaggtcaagtgcggcttttgcggcaggcggcgtcaccagcgggtcgataacaataatgcctttctcgccctcaacgaacgtaatgttagagatatcctggccgcgcacctgatacattttatcggtgactttgaacaggccagaaataccgttgatttgcgactgacgccacaggctggggtttacggtttccggcgctgcggcattaatatcaaatttgtaatcgtccgcgcggtagtaaactttaccgttcgcatcacgcagaataccttcatccagcagcggggcgataaatccacgctgggcatcgtcaaaatcctgacgatcgctaaacggtaatgatttggcgtaattctgattaacctgttgggtatattgagtggcggctttcgcttcctctttcgcgttagcggtatttaccatcatgccgctggcggcagttaacgcaataacaatcctgctcaaacggaataaccgagagttattcatataaatctccatttatcatttatgtcgtaaatatgtaatccatgcaaaatacgtcatttaaagctggcgttatcataattgggaaattgcgactttaataagtggaagtgtgagcggaacgcgccattttattaggcatttgtgctgaagagggaaaattacagtaaaactatcattgcagaaaataatatgagtcgttttatgtgtttattatatatattgtacctgtcgttggcacagcgggacattgcgctactgtgccaacgttttactcatggggctttagcacagaactgtggcaaaaaacgttgatgcgccaatattgctgcaccctgagcgccattaaagtcagaagatgaggcggcaataaagcgcacgacctgatgcggcagtggacggcgcaggtacttttgggtcatggcaacgagagtctcgcgtgggaaggcgggcatatccatcacgccaccgcccaggatcaccgcatcgggatcgaacagattaatgctggtggcaatggcccgtgccgcgttttcaagcagactctggacgaaaggggcgttttccgcatggacgaaaagatcgcgcaatgggtaatttcggggctgttgttcgtaccagcgtcttagcgccattccagagcaattggtttccaggcacccaggattgccacacgcgcagtgttgggtcatatctcccagggggatatgacccagttcgcctgccacaccgtgtgcacccgtccacggcgcaccgttcatccacactgcgaaccccatccccgtaccgagataggccgccagaaccagttgttgcgtaaggcggttttctactacgtcccaggagagttgcaggttaacgtcgcgggaaaactcaaccggacaattcagcgtattttcgagcttatcggcgagatcatataaatccgccgctgttaacggcaggttaggcgtagaaataatggtgcgtttatctttactgaccagcgccggaaatcccatcaccagaccatgacagcgagcgttaaagcgcctgagttgctcgtcaatcatttcgccgatacccgacaccaggccgggagcaatgacttctgcggtccgctttttttcgcagtgtagcgtttcaccttctgctgtccgcagacaaaagcggatatgcgttgcccccatatccacgcccgctacgacgttatgctgtttttgcatgaggctgtacctcgctttttgcagccagaatctgcgcggtcataattctccatgcttcgtcgatattttccgcatgattaaacaggccggaagtgccgacgataaagacatccgcccctgccgccatcagtttttcgtaagttgcctggttgcaggaaccgtccacctcaatttcgtactccagaccttctcgttcacgccatgccttcagttcggcaagtttatccagcatttcaggaatgaacggttgtccggcaaagccgggatcgacagtcatgaccgtaattttatcggccttatggatatagtatttcatggcctcaactggcgtctccgggttaaggatcagccccactttcatgtcatgacggcggatttcatcaatcaggcggaacgcctggccgttgatggtttccggatgcagagtgatgaaatctgctcccgcacgcgccagttgagcaatgtaatcctgcggccgcgtcaccatcagatgacagtcgagcggtttagttgccagttttttaacctgacttacgaagaacggtgagagtgtcagattggggacaaagtgaccgtccatgatatcgatgtggaagtaatcggcatggctgtcgataaattcgatctgttctttaaatttcagcagatccatacacattaacgagggggagattttcatgttcaattccttacttactgataagacggtcaagggcgacagccgcgataattaatccgcccatcaccaccagttggtaataggtttgtacctgcaaaatattcagaccgttgttgatggtgccgatgatcaacccgccaatcaccacagagaaaatgcgccccttgccgccgaagaaactggtgccgccaatgatggcgctggcaatggcataggtttcaaaacccataccggcaagcggttctgcggcaccgagtcgtgcagttgagacgacgcctgccagacctgcacaaacaccggagatgataaacaccaccaggatgtggaatttcacgtcaatcccggaatagaacgccgaatttttgttgccgcccagtgcgtagatgttgcgcccgagccgcatacgcgttgtcagaaaccaaaggatgagcgcgacaattagtgagaagataacggggacaggtatcccaattacgctggcggcaaagaagttcacgaagtcaaatgagaagccgtataccgagttggcatcggagatcaccagcgtgatcccacggaaaatcgcgttggtgccaagggtgatgatgaacgggtgtagccccgtccagttgaccaggcagccgttgatcgcccccagtgcgccgccaaccagtacaccgccaatcatcgctgcgagaaacgggtcaacacctgccaacatcagtttggcggtcaccataccggaaagcgccagaatcgcgccaaccgagaggtcgataccagcgaccaggatagcgaaaaactcgcccatgccgatcaataccgtcacggagctttgaacaaaaatctgggtaatattattggtggtcagaaaatattctggtgacagcgaaccaaagatggcgacgatgatcgccaggataaaaaaggtgccgtatttatcccagaacagcgcaaagttgaacggtttcttctcgctcgcttcgctttttactcttgtggtaaagcccatgccataatctcctcttcgctcatgtcatcgcgattcgtcaggatttgcgtcagtcgtccttcgcagaacacggcgatgcggtcgcagacggtgataatttcaggtagttcagatgacaccatcaggatgacttttccgtcgtccgccagttggcgcatcactttgtaaatttcggctttcgcgccaacgtcgatgccgcgggtaggttcatcgaaaataatcacttccgggcaacagcacagccatttggagatcaggactttctgctgatttcccccggagagttcggtgatattctggtttaccgaatgacatttcagcgccagcagttcgcgttgattttcagcggtacgttgctcgtcaacttcatgaaacaagcccatcgcgcctttatagccgccgtctttcagactgcggctgatcgccatgttctgagcgatggaaaagttggggaaaaaaccgttatcccggcggctttcagtgatgtaagccatcccttttttcacggcatccaggggtgaacgtggagagatatctttgccattaagacggatttctccgccagcgcgtttatccacgccaaacagacaattcatcagttcagtacgtccggaaccgaccagtccggcaaagcctaatatttctccccggcagacgctaaatgagatatcccggaccttttttctgtcacgactggtgacgttccgcacctcaaaaaccgtttcgtgcgcaaggttgctgacattctccttcatcgcgttaaaacggttttgcagttcgcggcctaccatcagacggacgatatcgtcatttgacacatcgcttactatgccgctgcaaacgctgctgccgtctttcatcaccgtatagcggtcgcaaatacggcgaatttccgccaacttatgcgagatatagacgatggccgtaccctctttacgcaactgattcatgatcagaaacagatagtccacctctttattggtgagtgaggaggtgggttcatccatgatgatgactttggcatcgagcatcagcgttttggcaatttctagcatctgcttgtggctgatagataaattcgccactttctcatctagatcaactttcaagcccacgcgtaataacatcatggcggcgcggacacgcatttctcgccagtcgataatattgacgccacagatttttttcgtcagatgacgaccaatatataaattttccagtacggttaattcatcaataacgctgagttcctgataaataatcccgataccgagttgtgccgctaatttatgatccagcttgttatagctaatgttattaatggtaatggtgcctttggtcggctcatgtattccggataaaactttcattagcgtggatttacccgcgccattttctcctagtaatgcatgtatttcaccaggataaaccgttaaattaaccgactttaatgcgtgaaccggaccaaaggacttgccgatccccgccatcgatatatatggcgtggccataaataacctctctgcacgaaatatcgtattattgcctgatggctacatttatcaggtctacgttcaggttattttgttggccggataagacacttcattagcatcatcatccggcatcattcagttttattgagtgaccaggattgaatcgaccagtttaaattccggtgctttatccagcgggataaccttgccggatttctcagcgtcaaccatcagcttcagacccgttgcgccgatatccgccgggttctgggcaaccgtcgcggtcatttgtccggcttccaccattttgcgggcttccggaatgccatctgtaccgacgaccagcacttttcccgtttttccggcgtttgcgactgcctgagcaacacccattgccatcgtgtcattcgcgcaatagatcgctttaatattcggattacgttgcaacacgttagtggcgacatccagtgctttaatgcggtcccagtcggcaggctggctggcgacaagcttgatctggcttgcttttttgaaggcttcggtggcaccattacgacgcgcttcaccggaggcgttaccggctttaccctcaatgattgcgacttcaccaccttcagcgcccaatttgtcaataatgaacgacgcgcctttcgccccgacagcaacgttatcggtggtgacaaaagcttccacattgccgccagcttttttcagattatccatgtcgattttttcatcgagattaaccagataaatgccttttttccatgcgcgggcgacaggcatgaccagattcactgaggataatggagcgaaggcgatacctttgtaatttttattactgagatcttcaaataactgcaattgagattgaaaatcgccttctgaaggagaggcaaaaatatcaacgctgacgcccagtgtttttgcttcatcttcaatgccttttttcatatctacccaaaatgggttggagagggttttcaatacgacagcatattcggcggcagcaaaagcgctggttgacaacattaagcccacgagtgtgccgctgaaatatttcagatatttattcataataatgttctcacggtaaggggacaggtaactccgcgatggcggaattacctttttcttatttcagcgcgcctggtgagaagaaatcaacaattgcgccggttttttgcatattaatattagcttgttcaatgttgagctgggcgacagagacaaaaaaagcgtccagcaaagttagttgtaatattcttgccgaggcattacgacctaataacggcgtttccggggctggtgagcaaataatataatcggccagtttcgctatcggtgaatggtagctatgggttatacaaataatctttgccccgttcttttttgccagttctacggccgcttttacatcactggttcgcccggaatgggtcactaccagcacaacatctccttcctgtaacaacgaagcggacatcatcatgatgtgagcatcaggataggcctgacagcgtacgccaatgcgcaagaacttgtgctgtacatcagcacagatagcatttgatcctccggcaccgtacaaatcccgctgtctggcctgatagaaaaagcgggcggcacggtggatctcatcaacgttgacgatcgactgaccttccataatggtgcgtaaagtgatgttaaataccttattcaccacatcctgcggcgcttcatcaaaagccaactcggaaggcaatacctgttctgactgagaaaaataatcttccagcgcactgcgtaagttacgaaagccgctaaaccccagcagctttgataccttaactatcatcgcttcagataccgccagagcttctgcgacatctttaattgcgggtgcacaactcaggttaccgggtttgagtaaccactccacgatgcggctttcattttctgtcattccttcctgcttcattcgcaggtaaggcgctaaccctataccgttcggaagcgctgaatcaaactctgactggctcatcacgttctcttgtccttgaattgaagacgccactatatcaccacagcaagaacagaaaagatgctggcgacttcacaaaaaaataaaatttataaagtttattttattgtgaacaatggcgagtggcttaaaattttatttcatttaattagtttaaaaacatgatgttatttgtttttctggttttttagatgatagatgttgctggatggtgagtgtctttaacgctattgcgctgtcagatgtaactctgtaaaacagatcaggaaggcgtaattcatcgattttgggtgtttttaattcattaacatcacaaatgttttttgattgtgaagttttgcacggacggggaagatgaatgaaaaagattgcatttggctgtgatcatgtcggtttcattttaaaacatgaaatagtggcacatttagttgagcgtggcgttgaagtgattgataaaggaacctggtcgtcagagcgtactgattatccacattacgccagtcaagtcgcactggctgttgctggcggagaggttgatggcgggattttgatttgtggtactggcgtcggtatttcgatagcggcgaacaagtttgccggaattcgcgcggtcgtctgtagcgaaccttattccgcgcaactttcgcggcagcataacgacaccaacgtgctggcttttggttcacgagtggttggcctcgaactggcaaaaatgattgtggatgcgtggctgggcgcacagtacgaaggcggtcgtcatcaacaacgcgtggaggcgattacggcaatagagcagcggagaaattgagattcatccactacttgcatggatgagtaatgattaatgtggatagagtttctttttgaggttggctaatgaaacgctttccgctatttcttttattcaccctgctcacgctgtccaccgttccggcccaggccgatattatcgacgacaccattggcaatattcagcaggcgattaatgacgcttataaccctgaccgtgggcgagactatgaagattcgcgcgacgacggctggcagcgtgaagtgagcgacgatcggcgcagacaatatgacgaccgccgccgccagtttgaagatcgccgcaggcagctggacgatcgccagcgccagcttgatcaggagcgtcggcaactggaggatgaagagcggagaatggaagatgagtatgggcgatgaggttgggtatggagcaggcatcgcccctcaccccaatggggagagggagaaaacgagcgcaatattcaatatcgagcacaatcggtcccctcgcccctctggggagagggttagggtgagggggccagcgcgcacattccctctcatcacgccaccccaatctccatcccatcaaaccccacctcaaaccctgacggtagtgcgttttccatcagccacgcatcaaactggtggctgatatgggtcagaatcacccgtggcgagcggataacctgattcagcgcaagcacggtatttaaatcacagtgattacgcggtgcatccgcgcgcggcgggtgactgcaatccatcaccattacctgcggctgattattgcgtaaaaatttcagcgttttttccggcaagcctgcggtgtcagacagccacgccacccggctgtgtgccgtttccagcagataaccgaaggtcagttttgagtggttgagcggcaggggcgtgacctgtaacccctgcaaatcaaacaccacaaacggttccaccgtgtggctgaaatcaagcaggcccggatgtttaaacagatcgtcgcagccctgttcatccggcgggccgtaaaccgggatcggatcgccaacgccccagcgcagcggaaacagcccctggacgtgatccatatgataatgcgtcagcaaaaactgctggaacgatccgggcgaccagcgatcggcgagatcgtgcagcccggcgtcgatcagggtgattgcgtcgttaaacttcactacgccgctgcacggttggcggcgatactgcggcgagcgccgcgctctggcgcaggccgcacactcgcagccccatgccggaacgccctgtgcgccgccggtgccggtgagcgtgagggtcaggctcatgttacagcgccttggtgaagcggaagtggctctgctcgtagccttcgcgcagatagaaacggtgcgcgtcgtggcgcttcacgttggtcgaaagttcggtcatttcggccccggcctggcgggcttcttcttctgcccacgccagtaacttactgccgacgttcagaccgcgcgcctgcggcattaccaccaactcctgaatttcgccgatccagttgacatgatgcagatgaaactgcaaatgcaggccgatcatgccgacaacttcgccatcaagcagcgccagatggtagcgcatgtttgggtcgcgcagattggcgttaaaacccacgcgaaacgcgtggtggtcaaactccgcctgttttagctcacaaatcagcgcgtaaaccgcgtcggtgtcgtactgcgtggccgggcgaagctcacaagcaggcatggtgtttctccttctgatggatcagcgtcagcagcgtgtcgaccgactggcgcaggctgccgtcattgttgagcgtatggcaatcctgtggagtatagcgggcggcgcgcgccaggcgggcgttaatttcactggcgttttcacggccacggttttccaggcgctggcggaggatctccggcgaaacctgtaaacagacgggcagcagcgccgattgatagcgcgcccgcgcctgcggcagatgggcgcgtgagccgttgaccagcacgtcgaatccggcgtgcagccagagatcaatctcgacgccgacgccataatacagaccgttagcgtgccagcttaaggccaacagattttgccccgcgcgggtaaaaaactcctgctcgctcagggcgatatggttttcacttccggcgctggcatcgcgcgtgatgtagcgatgcgccaccagtaactgagtttgttcccgcaggcggagttccgccagcaggctgtctttcccggagccggacggccccattaaccaaatcagttttcccatcatcagaacacccttttaccctgacgccagacgtggtcgatatgaatatgattgtccttgcgatgcgccagcaccaggtcggcgcgtttgccctcgccaatcaccccgcgatcctggagattaagcgcctgcgctggatttttagtcaccagcttcaccgcctgcggcagcgtaaagcggttgctctggtcatcggcgacgcgaaatgccgcatcgagcaggctggcggggtagtagtcggaagagaggatatccagcaggccaagctgcgccagttcactggccgccacgttgccggagtgcgagccgccgcgcacaatattcggcgcgcccatcagcacgttcatgccatgcttgcgcgaggcttccgccgcttcgaacgtggtgggaaattcggcgatcacgctgccaagctggtgagattcagcaacgtgggcgtgggtggcgtcatcgtggctggcaagcgcaatttttcgcgcgcggcacagggcggcgatggattcgcgattcggctgcgaccagcgtgcggcgagcgccagttgctcttcttcgtactgctgcatctgcgcatcagtgagggagtatttgccctgataatattcgcgatacttctcgcggttggcgaactggcgctggcccggcgagtggtccatcagcgacaccagcgtcaccggctcgcgctgcaccagtttttcaaacagcggcagcgtggtgtgatgcggcagttcgcagcgcagatgcagacggtgctcggcgcggttgacgccgcgtttctgcgtctcttcgatggcgttgatcatcttctccagattctccagccgatcgccgccgtcgcgcacgtcgccaattgccacggcatccagtacggtggtgatgccgctcgccaccatcagcgcgtcgtggctgctcatcgccgagtgggcaggccagtcaactttcgggcgcggggtgaagaatttatccagattatcggtatgcagctcaatcagccccggcagcagccagccgccttcgccgtccatcgcctccggcaggcggctctggctttcggcaaaggcgcggatttcgccgttctgcacctccagcgaaccgcttaccacctcgttttccagcaccagcttaacgttattgataatcatgaagaggctcccattgggtgcaggcggtcggcgacgtcattacgtacagcttcgtcatggaagatgcctacgatggctgcgccacgggttttggcttcgcgaatcagttccaccaccgcggcgctgtttttggcgtccagcgaggcggtaggttcgtcaagcagcagaatggggtagtcgacgataaagccgcgggcgatgttgacgcgctgctgttcgccaccggaaaatgtcgatggtgccaggtgccacaggcgttccggcacgttcaggcgggtgagaagacgcgcggctttagcggcgcaggcttcacgcggaacgccggtatcgagcagcggctgcatcaccacttccagtgctgagatacgcgggatgacgcgcagaaactggctcacccagccgacggtggttttgcggatttccaccactttgcgcgctggcgcggtgaccaggtctacccactcgtcaccgtgtttgatctggatttgaccttcgtcgggcagatagttggcgtacagcgagcgtagcagagttgatttgccgctgccggaatggccgtggagcaccacgcattcgcccgcgttgacggtgagcgaggcgcgattgaggacgggcaggcgcacgccgttttgctggtgcaggatgaaggttttactgacgttttgtacgttaatcatttttcgcctcgtggttcgggtgtcggatgcgacgctgacgcgtcttatccgacctacggggagcgcatttgtaggccggataaggcgtttacgccgcatccggcaccggctcaattctgcaaaaccgatgacaccagcagctgtgtatacggatgatgcgggtcgtcgagcacgcggtcggttaacccactctccaccacttgcccctgcttcatcaccagcaaacggtccgccagcaggcgggcgacgcctaaatcatgggtgacaatcaccaccgcgaggttcagctccaccaccaggccgcgcagcaggtcgagcaggcgggcctgcaccgacacatccagcccgccggtcggttcatccataaacaccagcttcggatgcgtcaccaggttgcgggcaatctgcaaacgctgctgcataccgccggaaaaggtggtcggcaggtcgtcgatccggttggcgggaatctccacctcttccagccacttctgcgcggtggcacgaatatcgccgtaatgacgtgccccggtcgccatcagccgctcgccgatattgccgcctgccgacacctggcggcgcaggccgtcgagtggatgctgatgcaccacgccccattcggtacgcagcaggcgacggcggtcggcctcgctcattgcatacagcgaacggttctcgtagtgaatttccccctgctgcggcgtcaggcgcgcggagatcgacttcagcagcgtggtcttcccggagccggattccccgacaatgcccagcacttcccccggccataaatcaaaagagacatcgctaaagcctttgcccggcgcgtaaaggtgggtcaggttattgaccgaaagtaacggttgattcattggttttttgcctcgctctgttggcggcaataatcggtatcggagcagacaaacatgcggtttccggcgtcatccagcaccacttcatcaagatagctgtgggtcgatccgcagatggcgcatggctcatcccactgctgaacggtgaacgggtgatcgtcgaaatcgagactttccacgcgggtaaacggcggcaccgcatagatgcgcttctcgcgccccgcgccgaacagttgcagggcgggcatcatgtccatttttgggttatcgaatttcgggatcggcgacgggtccatcacgtagcgcccatttaccttcaccggataggcgtaggtggtggcgatatgaccgaagcgggcgatatcttcatacagtttcacctgcatcacgccgtactcttccagcgcgtgcatggtgcgggtttccgtttcgcgcggctcgataaagcgcagcggctcggggattggcacctggaagataattatctgatcttcggtcagcggcgtttcggggatgcggtgacgcgtctggataaccgtcgcatcgtccgtacgttccgtggtgtttaccccggtcacgcgcttgaagaagttgcgaatcgacacggcgttggtggtgtcatccgcgccctggtcaatcaccttcagcacgtcgctttcgccaatcacgctggcggtaagctgaatgccgccggttccccagccgtacggcatcggcatctcgcgcccgccaaacggcacctgataaccggggatcgccaccgcttttaagatggcgcggcggatcatgcgtttggtctgctcgtcgaggtaggcaaagttgtagccgctcagattagccatggttctgctcctgttgcagacgtttgagtagctccagttcggcctggaaatcgacgtagtgggggagtttgaggtgtgagacaaagcctgcggcttcgacgttgtcggcatgtgccagcacgaactcttcatcctgcgccgggcctgtcgcgtgctcgccgtactccggggcttgcagagcgcggtcgaccagcgccatcgccatcgctttgcgctcgctcatgccgaacaccagcccgtagccgcgcgtgaagtgcggcggctcacccggcgggtcgataaaaccgttaaccatttcacactcagtcatcagcagttcgccgacgttcaccgcaaatcccagctcttccggcacaatcgacacgtcgatatagccgctgcggatctcgcctgcgaacgggtgattgcgcccgtaaccgcgttgggtggagtaggccagcgccagcaaatagccttcgtcgccgcgcatcaactgctgcaaacgggaggagcgtgagcaggggtaaaccggcggcgtgcgggtgatgtcatccggctgtgcgccgctatcctcttcaaacttcgccagcccctgacgcgccagcaggctgaaaacgtgcggcgacggctgctgttcgctgtcggcggtggtcagcgtcggcgcttcgccgtttgccagcagggtaaaatcgagcaggcgatgggtgtagtcgtaggttgggccaagcagctggccgccgggaatgtctttataaacggcggagatacggcgttcgagacgcatcccggtggtgtcgagcggctcgcttaccgccagcttcgccaacgtggtgcggtaggcgcgcagcaggaaaatcgcttcaacgttatcgccgctggcctgtttcagcgccagcgccgccagttcgcggtcggcaatgccgccttcggtcatcacgcgatctaccgcgaggttaagctgctgttcaatctgggcgacgctcagttcgggcaaatcggtatcgcctcggcgtcggctctcttgcagggcgtgggcggcgtcgatcgccttctcgccccctttcacggcaacgtacatcagcacacctccacatgagtggttcgcggaatagccagcaggcgctcgccacaggtcaggatcaggtcgatgccgagcgggaacggatgcgggcgctcggtgagttcgtgcagaatgcactccggcagctgcggagcgatcattcgttcttcggcaatacccgcaccagtaaggcgcaacatgcgtccgccgctcaggctggcgacctgtaaaatcagcgtcgcacccgcttccggcgcaacggcggtgccggtggaaagggcgttgagctgttcgctggaaatcgcctcatccgtcaccgcgaaggtcgcctgttccggctggctgaccagcggcgcgttggtatgaaaacgcaggctctggttgacgatatcgttatttaatggggtagaaagccacaccggcgtgtcgttatcggccagcgtcagcagcacgctggtggtggcgatattcagcggttgccagccgcgtttgagctgatgcagggcgacaatcacgcccggctcgctcatggcctttaacaggcgacgaaaactgtgctgggcatcctgcacgggaagcataaaagcggtttccagggtcatgcgttgtctccgcgaaccatcgtaaagaagtcgacccggctggcgttcacttcggcctggcgtgcggcaatgcgtgccatacggtcagcgtccagcggggcaataagggtttctgataagttttgaaagtggcgagattgctgcatcagcgcgtcaatcagcgcgcagcgttcggcgtgctgtttatcacgcccctgcacccagctgtagccgagcgtgccgtcagtcaggcgcacggcggcgcgggtcagcgtggcgtcgccggcaaaaaaacgttcgccggtgccgcccatccgcgcctgaatctgtaccaggccagtttcagcggcgcggatcacctcatagtcggcggtgatgtttagcgcgttcaggcgtgctgccagttcagccggttggctgtgcgccagcacggacatccagtgctggcgggtcgcggtatctgcgtgcattcagtgctccatagtgaattcaatcatgtcggcgcgcgtcaggctgacggagtactccgccgggctgctttcaccgtcacggtggttaagggtgcgcacgcacagcagcggcgacatattcgggatttcaagacgctggcactctttggcctgggcgcggcgggcgctgatccgcgtctggctgcggcgcagcgcaattccggtttgctcgcgcagaaaatcgtgcagcgagccgctgtcgaagcgttgcagcgtcggccagagggtgaggtccgcgaagtagtggtcgattaaacagagcgcgacgccgttgacacgacgcagggtgcgcaggtggatgacgttctccccctcggtaatccccagtgcgtcagcgacgtggccggacgcggggcgcaataccgaaagcagtttttcgctggtgggatggctgccctgatccagcagattctggctaaaacgcgcctgggcgttgagcgggtaatcgaacgggcgcatcagcaccagcacgccgacgccctgacggcgctgtacccagcctttttccaccagttggtcgatggcgcggcgcagggtgtggcgattcacctcaaagcgcgctgccagttgctgctcggcgggaagatagtcgccgcagcggtagtgttgacgaagctcctgctcaagttttgcggctatctcttgatagcgtgttgggtagctggtcggatgtgtagacaagtgcatagatatcaatgcctcgcttatcagataaagtgcttacgcaaccgttgagagaggaaatccagcaggctgaccgtgacgatgataagcaccatcagggcgcaggtttgttggaactggaaaccgcgaatcgcttcccacagggtgacgccgatcccgcctgcgccgaccatgccgacgacggtcgccgagcggacgttggattcgaagcgatagagggagtaggagatcagcagtggcatcacctgtggcagcacgccgtagaggatctcttcgagcttgttggcaccggtggcgcgaatgccttccaccgggccgggctcaatcgcttccaccgcttcggaaagcagcttggagagcacgccggtggtgtggataaacagcgccagcacgccagcacgccagcgaacgggccgaggccgacggcgaccacgaacagcatggcgaagaccatttcgttaatggcgcggcaggcgtccatcaggcggcgaacgggctggtaaacccaccacggcaccaggttttcggcgctcatcaggccaaaggggatggagagaaccaccgccagcgcggtgccccagacggcgatttgcagcgtgacggccatttcggtgaggtaatcctgccactggctgaaatcgggcgggaagaagtcggcggcgaacgtcgccatgttgccgccgtctttgatcagcgtaagcggggccatttccgcgccctgccacgagacgaccaacacggcgagtacaacggcccagctcagaagcgagaaccagctgcgcttgggtggggcgatggtgatggtttgcatgtttggctccggtctgtaggccggataaggtgcttgcaccgcatccggcatcaacgcctgcacattgtcggatgcgacgccggggcgtcttatccgacctacgatttactgcaccgctttactcaccgaactcatcgcgcttagcgcgttgttcaggcggtccaggtcatccagctgcgcctgaatctcggtggtttttgccagcttgtcctgctcattcagtcctttattgcttttcacgccctgcatctctttaaacagcgcgagctggcgaatcggcaccagttgcaggtcgctggaagcgcggaatggcgcccagcccaggcgttccagcaccgctttttcttccggcgttttgccgtagttcataaagaagtcgtagatcttgtctttggtggtttcggaaagattcttgcgccagacgatcggatcgcctgggatcagcggcgacttccagatcaccttcagttctttcagcttctctggcgcggaggttttcagcttgtcgaggttttcggtgttgttggtggcaacatccacctgcttgttggcgacggccagcgcgttggtttcatgcccggcgttgacggtgcgcttgaagtcgctggcggagatattgtttttggcgaagacgtagtagccggggacgaggaagccagaggtggagttaggatcgccattgccaaaggtgagatctttccgcttcgccagcagatcgttcaggttgttgatcggactgtctttgttgacgatcaacacgctccagtaacccggcgatccatccgccgcgaccgtctgggcgaagacctggccattggcgcgatccaccgcttccatcgccgacagattgccgtaccaggcgatatccactttattgaagcgcatcccctggataatgcccgcgtagtccggggcaaagaaggcgttgaccttcacgcccagcttcttctccatatcctgcaagaacggcgtccattgcggtttcaggttttgctgtgattccgttgaaataatgccgaaattcaacgccttttcctgctcttcggcgtgcgccgggcttaacagggtgctgaggctgaacatgctggtgaaggccagcgaggcaattatcttagcgttcattcgttttcctcaatgatggggatgtcaggcagctttcgcgttctcttcgacgcggttaatgctgcggtagagatggtcaaaacgttcgttatcaaactgttggctgctgccgtcgtagaagacgtgcccctggcgcagggcgacgatgcgttcgcagtagcgcagggcgtaatccacctgatgcagcgtgacgaccacggtgatgccgtcgttctggttgatgtcgcgcagggtgtccatcacgatgcgcgctgattctgggtccagcgaggcgatgggttcatcggccagaatcactttcgcctgctgcatcagcgcacgggcaatcgccacacgttgctgctggccgccggagagggtggaaacgcgctgatgggcaaaatgcaccatgccaacgcgggtcagcgcctgtaacgcgcgctgtttctgctcgccggtgaaccagctaaaacaggtgcgccagaacggcgtgctgccgagcgcgccaatcagcacgttctccagtacgctcaggcggttcaccaggttgaattgttggaatatgtagccggtatgggcgcggcttttgcggatatcgcgggccaggcggccttcgcgctggactgtgcggcccagcagctcgatatggctaccgacagatttatcgccggtaatcaaaccgcttaagtgacgtaaaagggtggattttccggaacccgacggcccaagcagagccaccatttcaccgtgatgaatgttcagatcaaccgcatgcagcgcctgatgctgattgaaggttttggcgagcttctcgacacggataatcgtttgcatgatgcagcctccctaaaaaagtggctccatcgtggcggattattgtgacgatttggttaattaaaagtgactaacagatgaagagttaacgggaattcgatgacagtgcgggagggcgggcctcccggcgggttattgcgttggttgttgtttgacgacattaatcatccacggtacgccaaatttatcggtgactttgccaaagccatgcgcccagaaagtttcctgccaggccatttcgatttttccgttagcggcaagattgtcaaaccagcgttttccttcttcgacctgttgcgaatcgagcaccagcgtaaagccggagtagctggcttttcctgacggcatggcatcgctcatcatgatgtcgcttccggcaatgcgcacattggcgtgggcgatggcggtatcgggaaattgcattccggaagggcagttctcggcgctgtcctgcgctgattttggcatttcgccgaagctgattttatagagcagttccgcgcccaacgtacgttgataataggcaatcgcgtcggaacagttaccggcaaaagagaggtagggacttaacggcatgatggtgacctcagttaagagaagccagttaagtgtagttcgaaatttatacagatgagaggcggcctgataagacgcgcgagcgtcgcatcaggcagtcggcactgttgccggatgcggcgtaaacgccttatccggcctacggagggtgcgggaatttgtaggcctgataagacgcgcaagcgtcgcatcaggcagtcggcaccattgccggatgcggcgtaaacgccttatccggcctacggagggtgcgggaatttgtaggcctgataagacgcgcaagcgtcgcatcaggcagtcggcaccgttgccggatgcggcgtaaacgccttatccggcctacggatggtgcgggaatttgtaggcctgataagacgcgcaagcgtcgcatcaggcagttggcactgttgccggatgcggcgtaaacgccttatccggcctacggagggtgcgggaatttgtaggcctgataagacgcgcaagcgtcgcatcaggcagtcggcaccgttgccggatgcggcgtaaacgccttatccggcctacggagggtgcgggaatttgtaggcctgataagacgcgcaagcgtcgcatcaggcatctggcaccgttgccggatgcggcgcgagcgccttatccggcttaccgatcacaatacaatcagttctttttcacaaactcagatttcagtttcatcggaccaaaaccgtcgattttgcaatcgatgttatggtcgccttcaaccaggcggatgtttttcactttggtgccaattttcagcatcgaagagctacctttcaccttcagatctttaatgatggtaacgctgtcgccgtcagccagcagattgccgttagcatctttaacgatcagctcgtcgctttcctgtgcaggttctgcgtcgttccattcgtaggcacattccgggcagatgtacatgccgttatcttcgtaggtgtattcggagttgcattttgggcagtgtggtaatgacatgtggatttcctcaaaagtcagcagggcaaaagcgccaaaaaacggcagattgccgaaaaaggccgcaattatacacaaaatccctgagtttgtcgggggtactgctgattttagacgacgatcgttttcatttgaaaggaaacgcaaaaagaaaataatctttttgcctctatttattatttaagataatgttaatgctctacttgttctttttttaattcacatgatatttttatctttctgacgttttaaacgtatcagaagacgttatttattctgataaaaaacaacacactaaatataaaattatttcttgcagtaattataaaagccgaaaacagaactcaaaaacaatctggctaaataaaataacaaaatttgctttaaggaagaattttctatgtacacacagaccctgtatgagttaagtcaggaggctgaacgcctgttacagctttctcgccaacagttgcagttactggaaaaaatgcctctctctgtacccggagacgacgcgccacaactggctttaccctggagtcagcctaatatcgccgaacgtcacgcgatgctgaataatgagttgcgtaaaatttcccgactggaaatggtgcttgcaattgtcggtaccatgaaagcagggaaatcaaccaccattaatgccattgttggtacggaggttctgcctaatcgtaatcgcccaatgactgcgctgccgacgcttattcgccatacgcccgggcaaaaggaaccggtactgcatttttcacatgtcgcgccaatcgattgtttaattcaacaattacaacagcgcctgcgtgattgcgatattaagcatctgaccgatgtgctggaaatagataaagatatgcgtgcgcttatgcagcggatcgaaaatggcgtcgctttcgaaaaatattatctgggtgcccagcctatttttcattgtctgaaaagtttgaatgatttagtgcgactggcgaaggcgctggacgtcgattttcctttttctgcttacgccgccattgagcatattcccgtgattgaagtggagtttgtccatctagcggggctggagagttatcccggtcagttgacgttactggatacccccgggccaaatgaagccgggcaaccgcatctgcaaaaaatgcttaaccagcagctggcacgcgcctcggcggtactggcggtgctggattatacgcaactgaaatcgatctccgatgaagaggtccgtgaggcgattttggcggtggggcaatcggtgccgctgtacgtgctggtcaataagttcgatcaacaggatcgtaacagtgacgacgccgaccaggtgcgggcactgatttccgggacgctgatgaaaggctgtattacgccacagcagatatttccggtgtcgtcgatgtggggctacctggcgaatcgggcgcgctatgagttagccaacaacggtaagttaccaccgccagagcaacaacgctgggtggaagattttgcccatgccgcgcttggcaggcgctggcgtcatgccgatctggcggacctcgaacatattcgtcatgctgccgatcagttgtgggaagattcgctgttcgcccagccaattcaggcgttgcttcatgccgcttacgctaacgcctcgttgtatgctctgcgatctgccgcgcataaactgttgaattacgcgcagcaggcgcgggaatacctggattttcgtgcgcacgggttaaacgtcgcttgtgaacaattgcggcaaaatatccaccagatcgaagaaagtttgcagctattgcaactcaatcaggcgcaggtgagcggcgagattaaacatgaaatcgagctggccctgacctccgccaaccactttctgcgtcaacagcaagatgcgctgaaggtgcagttagccgccttgtttcaggatgattcggagccgttaagcgagattcgtacccgctgtgagacactgttacagacggcgcagaacaccatcagtcgcgactttacgctgcgttttgccgagcttgaatccaccctttgccgggtgttaaccgatgttattcgccccattgagcaacaagtcaaaatggaattgagcgagtcagggtttcgtcctgggtttcattttcctgtttttcacggcgtagttccccacttcaacactcgccagctgttcagtgaagtcatttcgcgccaggaagcaacggacgagcagagcacgcgtttaggcgttgtgcgtgagactttttcgcgctggttgaatcagcccgactggggacggggaaatgagaaatcaccgacagaaacggttgattacagtgtgttgcaacgagcattaagcgcagaagtcgatctctattgccaacaaatggctaaagttctggcagagcaggtcgatgaatctgttacggcaggcatgaatacttttttcgctgagttcgcttcatgtttgacggaattacagacgcgtttacgcgaaagtctggctctgcgtcaacaaaatgaatcggtggtcaggctgatgcagcagcaattgcagcagactgtgatgactcacggctggatttacaccgacgcccagctgttacgcgatgatattcaaacacttttcacggcagaacgatattgaccaagacgttacttgacggccccggtcgcgtgctggagtcggtttatccccgctttttagtggatctggcgcagggtgatgatgcccgccttccacaagcccatcagcagcagtttcgtgaacgactgatgcaggaacttctttcgcgtgtgcagcttcagacatggacgaacggcggcatgttaaatgcgccgcttagcctgcgtctgacattggtggaaaaactggcgtcgatgctggatcccggtcatctggcactgacgcagatcgcgcagcatctggcgctgctgcaaaaaatggatcaccgccagcactctgctttcccggagctcccccagcaaattgccgccttgtatgagtggttttcagcccgttgtcgctggaaggaaaaggcgttaacgcaacgaggcctactggtgcaggcaggtgatcagagcgagcaaatttttacccgctggcgtgctggggcgtataacgcctggtcgttgcctgggcgctgttttatcgttctggaggagttgcgctggggggcatttggcgatgcctgccgtctgggaagcccgcaagcggtggcgttgttgctgggtgatttgctcgagaaagcgacacaacatctggcagagagtatcaatgcggcaccgaccacgcgtcactattaccatcagtggtttgcctcttcgaccgttccgacgggcggggagcatgctgattttttaagttggctgggaaagtggaccacggcagataaacaacccgtttgctggtcagtgacccaacgctggcaaactgtcgcgctggggatgccacgactctgttcagcgcagcgtctggcgggggcaatgctcgaggaaatcttctctgtaaatttggcgtaaataatcagttacatcaatgagtcctaaacgaaatccatgtgtgaagttgatcacaaatttaaacactggtagggtaaaaaggtcattaactgcccaattcaggcgtcaactggtttgattgtacattccttaaccggagggtgtaagcaaacccgctacgcttgttacagagattgcatcctgcaattcccgctccccttttgcggccgtcgcgctgatttttctggcgtttgcggaaatgggccaactctgcgaggaaagctatgctgaaaaggaaaaaagtaaaaccgattacccttcgtgatgtcaccattattgatgacggtaaactgcgtaaagccattaccgcagcatcactgggtaatgcaatggaatggttcgattttggtgtttatggttttgttgcttacgcattaggtaaagtttttttcccgggggctgaccccagcgtgcagatggttgctgcacttgccactttctccgttccctttctgattcgaccgcttggcggactcttctttggtatgttgggcgataaatatggtcgccagaagatcctcgctatcactattgtgattatgtcgatcagtacgttctgtattggcttaataccgtcctacgacacgattggtatttgggcaccgattctgctgttgatctgtaagatggcacaaggtttctcggtcggcggtgaatataccggggcgtcgatatttgttgcggaatactcccctgaccgtaaacgtggctttatgggcagctggctggacttcggttctattgccgggtttgtgctgggtgcgggcgtggtggtgttaatttcgaccattgtcggcgaagcgaacttcctcgattggggctggcgtattccgttctttatcgctctgccgttagggattatcgggctttacctgcgccatgcgctggaagagactccggcgttccagcagcatgtcgataaactggaacagggcgaccgtgaaggtttgcaggatggcccgaaagtctcgtttaaagagattgccactaaatactggcgcagcctgttgacatgtattggtctggtaattgccaccaacgtgacttactacatgttgctgacctatatgccgagttatttgtcgcataacctgcattactccgaagaccacggggtgctgattattatcgccattatgatcggtatgctgtttgtccagccggtgatgggcttgctgagtgaccgttttggccgtcgtccgtttgtgctacttggtagtgttgccctgtttgtgttggcgatcccggcgtttattctgattaacagtaacgtcatcggcctgatttttgccgggttactgatgctggcggtgatccttaactgctttacgggcgttatggcttctaccttgccagcgatgttcccgacgcatatccgttacagcgcgctggcggcggcatttaatatttcggtgctggttgccggtctgacgccaacgctggcggcctggctggtcgaaagctcgcagaatctgatgatgcctgcctattacctgatggtagtggcggtggttggtttaatcaccggcgtaaccatgaaagagacggcaaatcgtccgttgaaaggtgcgacaccggcggcgtcagatatacaggaagcgaaggaaattctcgtcgagcattacgataatatcgagcagaaaatcgatgatattgaccacgagattgccgatttgcaggcgaaacgtacccgcctggtgcagcaacatccgcgaattgatgaataagctgaaacggatggcctgatgtgacgctgtcttatcaggccaattgaactcttaaggttcacttaatctctgacgcgcatactctcctccaggttaacggaggagagtgcaatgaaaaaccgtgtttatgaaagtttaactaccgtgttcagcgtgctggtggtcagcagctttctttatatctggtttgccacgtactgatctttcttcagccgtacccaggcccgcgtgccggaagtctcttgccggttttgcaggaaaaactgcccgtgatgcaactgtgtaatgcggctgacaatacttaaccccagaccaatcccgccataacggctgtccatacgtacaaacgctttactcaactccccgcatttactctcatcaatacctggtccttcatcttcaactgccatgaccgctccgtcatcttcttgcagcttaatcataatgttgctgccttgcgggctgtaacgatgggcgttttctaccaggtttcgcaataacatccgcagcagggttgcatcaccctgaacggtgatgtcggcggcgctctctggcaatagcagggtttgctgtcgctggtcgagcatggtactgagttcgtcatacgaggggagaatgacatcttccagcagttttacatgttgataattaccggaagaaaatgactgtccggcacgcgccagttgcagcagctgggagacgctctccatcatctgatcaagccgtgccactaacggtgctacatcaatgtgatgcgttttcgccagcagttccagatgcaaacgcacccccgccagtggcgttcgcagttcgtgcgcgacgtcagcggtaaacaacctttcgttatccagcgtgctggtcaggcgactgaccagatcgtttaacgccgaaaccaccgcttcgatttcgagggtggcgctgtgaatggcaatgggcgttaagttgtcggcggtgcgcgcttccagctctttttgcagctccgccagcgggcgggtgatgcggcgtaccgcctgatagcagataaatagcgtcaggctgaccataaagacgccggggacaatcaggctggcgaccgcctcgcggatctcacgcatgatgtggcgatcgttgttgcgattgtcgcgtagcgcctgctcaaacagctgaatctgctcggtactttcatgccatagccagaagacgctgatcagctcaaacaccaacaaaatggccccgatggtcaatatcagccgttggcgcagcgatattggtcggcgcagaaaatgcatcagattcaattagttttcctcattcgcgaccagcatatagccaaagccgcgcacggtgcggatacgggctttgcccactttgtcgcgcagattgtggatatgcacttccagggtgttggtcgagggttcattgtcccagttatagatgtcgttgtagagaatttcccgatgcaccggactgcctgctttgagcattaaccgtgacagcagagcatattctttgggcgtcagaatcaactcttcaccgcccatccatacctgacggcgacccatgttcagcgtcagattgccaacaatcagctcactttcgccctgattattatggcgtcgtagcagggcgcggatacgggcatgtaactcttccagcgcaaaaggcttcaccagatagtcgtcggcaccgacatccagcccggcgattttgtcggtcagcgtatcgcgagcggtgaggatcagtaccggcagggtatattttttctgccggatacgggcgagaaaatgcagtccatcttcgtcgggtaaccctaaatccagtaccaccaggctgtaatgacctgcctcaaggctttgttccgccatccgcgcggttgtcacgctatcgcacgcgtagccttcggtttgcgccgccagaatcagtccctgcaataacagcgtatcgtcttcaacaatcagaattttcattcactcactctcctgcaagtttgcagaatatcatccgcagcctggtaatacttcgtctcaacgccagttaatcccaatagcgtggagaataaattgtcttgtgaatagtgttgcgtttgcgcctgtttttgcaggcagttctggtcaacctgataccgtttttgataatcctccgacagccacagcagcatcggcacctgtttttggctatccggggcgatggcataaggcagaccgtgcagatagatgccattttcacctaacgattcaccgtggtcagaaagataaaccaggctggtggtaaatttatcctgatgttctttcagcagattaatcgctttatcaacaatatagtcgacgtaaaccagcgtgttgtcgtaagtgttcaccagttgctctttggtacaggtctggatctcattggtgtcgcaggttggggtaaatttcctgaactgaggcggatagcggttgtaataggtcggaccgtggctgccgatggtgtgtaagacaatcacgccatcaccttgcaggttattgatgtactcttcaagcccgtggaacagcacttcgtcatagcattcgccgttgatgcactgatcaggtagattcagcgcggtgacgttctggtgaggcacgcggtcgcaggcacctttacagccgccatcgttgtcattccacagcacgttgatgcccgctcgctgaatgatatccagcacgccttcctggtgctgtgccagctcttctttgtagtgctcacgcggcatatccgagaacatgcacggtactgaaactgccgttgccgtgccgcaagatgcggtattagggaaatagaccacgttatctttcgccagccgcgggttagtttcacgcgggtagccgttgagggagaagttctccgcccgcgaggtttcgccgacaatcaggatggtcaaatttttacgtttttcgttctgcattaacgggttgcggtgcgcgtcttcaccaattcgcaccagcggcagatttgccagtcgctgatgggagtaccatgaccagctggcaacaatgctgttagaggggcttaaggatttcaccagctctttgttattgcggaacaacgaggcgtagtctttataaaacagtgcggcgaccagcaaaatcagtagtacagaaaccagaatattggctccacggaaaagaacactgcgcagacgcgaggtggcaggtttgatttttatccagcaggcaatcagcgcagcaagcacgccgctgaatcccagcgttaataacatttgcggtgtcatcagcgcataactttctgccggagtggtatcaataatattggcaatcatcgagcggtcgatgacgatgccgtaagtcattatgaaatattgtgcagccgcgccaaccagaataaacaggcaggccagtggtcgattaagccataagaaagagcttagtgtcaggacaatattaatcacgctgaaagcgacgaccggcatcgacaagaaaaccagtacgttatgcagcgaatccagcggcagcgcctgcaacacctgtttaaaaaaggcaatattcaggcagatagagatataaaaagcggccaacaatagccaggcgagtaaattcaaagagggtctttttagtaggcgcttcaacatcacggtgtttccatcgaacaaagtgcgcatatgctcgcaaagcaaaattaagccaaccttaagttcttaaggttggcttttatgtttgctggattaaggggaattaatctttgcttattggtgcatctaagggatacgggtttttatgtagccggttgtaattcagcgcatacatggcggtgatgaccatcagggtgacaaatgaccacataacctctttcgctccggaccccaccacggcccagatgcagtagaggaaggcaatggtagtaactgccagatatgccgggcgtgctttaccaaagtgaccgtgtccgagcagcagtaacgccgcacaggtgtaaagatatggcaccagtgtaaagatgaccgagacggaagaaaccagaccgaactctttggtcgcgtttggtgaaatgctgctgagctggaagatggtcatcaaaataccgacgataatcagccccgccactggcgtacccgctttatttacacgggcaaaaatcggtgggaacagtccgtcatcggcagcggctttcgccgtttgacccgccagcaacgtccagccgcccagtgaacctaagcaacccgcagctgcgcagaaggaaacaatggccccggcggtgtcacccaacgccatccgtgcggcatcaccgaatggcgaagcagaaacgcgcagtgcggcattagggatcatccccataatcgcggtggtagaaagtacatagcaaacggcggcaatcaataccccaccaatggtggcgatagggacattgcgtttcgggtttttcaccacacctgcggcaacggaggcactttccacaccgatgaacgaccacagcgtaacgttaagggtactttgaattgcaccgaaggtgcccaggccgctgacgttccatgccgccatataggtttcaccacggaaccagaaccagccaaatacggcaatcccgacgatggggatcagcgccagcacggtggcaactgcctgcacacgggtgatcattttcggaccgacaatgttcagcaggacgaagatccacagcaccacgacgcaggtgatggttaataccaatggatctttcagaatcgggaagaagtaacttaaatatcctacgccaatgaccaccatggcgatattgccgatccagcaggccagccagtagaggacgttggtttgataaccgagaaacgggccaaagcagcggcgggcgtaagcgtaagaaccaccaggacttgggtcgaggaacgacattttggcgtataccatcgagagccccagtgcaccgataatcgtcaccaaccatccataaatggcaatcccgccagtagaggccaggtttgcaggtaacagaaaaacacctgaccccataatattccccgacaccatcagggtgacggggattaagcccactttgtgagcatcagcatccgaagacataattaaactcctgcgaaggcgagcttcgtgacaataaattacgtcatatcatacgcctgcattcgatagttgaattattatcgaccgggttatcgctgatgccgttattaatatagctcttcgttaaggttaaaaatcaggcgacagtgcgttctctgtgctgactaacataatgcagcggcgtcataccgtagaagtctttaaagacagaaataaagtacgacgtactgttgtagccgcaggactgtgatacctgagagatatttttaccgtccatcattaattcatttacggcataacgcatgcggcaggtggtgattatttggctataactggtgttttcgcttttcaactttttctttaacagacttgggctaagacataaacaactggctaccatactaagattccagtctttgtgaatatcgctttcaataatttgataaacgctgtcacttacacaattacgtaacatatacatcattaatgaaacgaattttttactgtcgagaaaacgggatagcaccgtgaataataatgcgcgtgttcgttccttttctgactcagtttctgcgggcatcatgctgtgttgcgcggcaacgcgaaagacgtctggcgtcaggcatggcagggtgagtatgggcgtagcgctacgttgccatactggtatttgcgagagatctttattcagaaaccggaggtaatctttgatgatgtcgtgactaatatgagcaaccaaagtgttgttaagagaggagacgtcgataatattattttcacaatttaataacgccatatggttagctttaaggctaataggttctttcccattcacccttatccagacatctttttcagtcaataaaacaatacaaggttggtcgctgcaaatcctcatacatgtactcctgagtgcgaataaaagaccagttctcgctaaagcaaagcgataccgggaaatggttatataattgtatgatgaatataaacatgcataaaaataacgagttttactaatagtacaaatttttatagtaatttctcatgtacatatttttttacaggataaataacaggcaaaaaaaagcgcggggtggggccgcgcaaaaagtatgacatttttgtttgcagcaatttttatgaaaacgttgccatactcaaaaggcctaaggccaggcggcgtaatgttatttaaacaattacgccttcagcggaatagtggttacgctttcacgcacataacgtggtaaataccgtcaataatttcagtcccttcagtttcgtgttcaaatccagggaaatggtggtcccaggattgcagcgagcgtaaataacttacttgcggactgtttttatcgccgaagttttcaccagacagcagcatcgggattcctggcggatacgggataactgagtttgccgcgatgcgtcctggcagattttcaatggataccagttcgacattgttgtcgacaatcgcgttgtacgcttcacgcggggtgacttccgccaccggcaggccggaataggcttcgttcaaccgtgcgccagggttgttttctttcagccaggcaaacatggtgtcacccagatcgtgaatccccatgttcgcgtaagtgtcaggatattgttcaacaagttccggcatcacctgcgccagcggtgtgttggcgtcatagtggcgtttgaaggagcaaagggtgttaaccagagttccccatttcccacgggttacgcccatagagaacaggaacataatttggaagtcagtggtgcgggtaggtacaatgccgtggcgaccaagccaggcagtgaccagcgccgccggaacaccggtttcttccagttcaccatcttcacccattcccggagcaaggatgctgactttaatcgggtcgagcatactccagttatccggaatatctttgaagccgtgccagctttcgcccggatgcattacccagcagtcctgaacggtggtcagcagtttggttggtgcgtcagcaaagtcataggttttgccggtttgtgggtcggtgacgacttctttgttccacggtttgaagaaccagctaccgtcagcggtgaactctttatatagccgcgccatcgcctgacggaaatcaaccgcttcgtcaatcacttcctgtgtcagtgacaggccgctgttgccgtccatcatcgacaccgccacgtcgttggatgcgcagatggcatacagcggggaggtggtggcatgcatcatgtaggcctggttgaagcgggagaagttaatcgccccacgaccttcacgtacatgaatataagaagcctgtgacagcgcattcagcagtttgtgggtggagtgggtggcgaaaacggtaggaccgttgtgatcgccaggttcgccgcgcatggcatagtgatcggcatagatcgggttgaaacgtgcatagccgtaccaggcttcgtcaaagtgcagacgatcggaggttttttccagcagatcctgcgcttctttagcgttataacacacgccgtcataggtgcagttggtcaccacgcagtaagacggtttttgcccggctttgtctttggtcagcgggctttcactgattttcttctgcaaggtttcaggttgcatttcctgcggatagattggcccgataatgccgtagcggttgcggcttggcaccatatagaccggtttcgcgcctgtcagcatcaaaccttgttcgatggatttatggcagttacggtcaacgaccacgacatcgttatcggtcatgcaagcctgcatgatggtgcggttagagccggaagtaccgacgactaccgaccaggagcgatcggcaccaaatacgcgtgcggcatatttttcgctttcgccaaatgcgccagtatggtcaagcaaagaaccgagggaagttcgttcgatgcccatgtcggtgcggaacagattttcaccatagtagtcatggtagaaacgtccggcgggtgttttggtaaaaccaacgccgccctggtggcctggcgctgcccaggaatattcatggatgtcactatatttcatcagcgcgctgaacagtggcggcaacagctgctggcggtagcgggtcatcgcggcaacggcgcgtccggcgataaagtcggcggtatcttccagaatccaggcgaattcatcgacaagctccagcaggtcgcgatccattgcggcgagggctttttcccgatcgcccaacaggaagaccggcacgttttgttggcgctcatgaagcttaccgatcaattgtctgacgttttgatgttcgtccggatgttccatttgatagctgaacatcaggcagtcaatggcttcgtttgaagagagaatggcaaaaccatcatcaaaggaggtggatttaatcacggtaacattttgctggcttaaagcatctgccagacgctcaacggcgttaccgacccaggtgtcttgatggagaaactcgctttcaacaattaatactttcatcattgcttacccggttatgaaggaatcttcgttgcgggcaagtatcttccggccttttcgggctgtaaagcgcgtgaaaaacaaacatttttgaaatatttagttttataaacaatacgttatgtgattattttaaattattttcactgcttattatcgacggctaaactatttttttggctgatactgatatcgtctttagccgggaaacgtctggcggcgctgttggctaagtttgcggtattgttgcggcgacatgccgacatatttgccgaacgtgctgtaaaaacgactacttgaacgaaagcctgccgtcagggcaatatcgagaatacttttatcggtatcgctcagtaacgcgcgaacgtggttgatgcgcatcgcggtaatgtactgtttcatcgtcaattgcatgacccgctggaatatccccattgcatagttggcgttaagtttgacgtgctcagccacatcgttgatggtcagcgcctgatcatagttttcggcaataaagcccagcatctggctaacataaaattgcgcatggcgcgagacgctgtttttgtgtgtgcgcgaggttttattgaccagaatcggttcccagccagagaggctaaatcgcttgagcatcaggccaatttcatcaatggcgagctggcgaatttgctcgttcggactgtttaattcctgctgccagcggcgcacttcaaacgggctaagttgctgtgtggccagtgatttgatcaccatgccgtgagtgacgtggttaatcaggtctttatccagcggccaggagagaaacagatgcatcggcagattaaaaatcgccatgctctgacaggttccggtatctgttagttggtgcggtgtacaggcccagaacagcgtgatatgaccctgattgatattcactttttcattgttgatcaggtattccacatcgccatcgaaaggcacattcacttcgacctgaccatgccagtggctggtgggcatgatatgcggtgcgcgaaactcaatctccatccgctggtattccgaatacagcgacagcgggctgcgggtctgtttttcgtcgctgctgcacataaacgtatctgtattcatggatggctctctttcctggaatatcagaattatggcaggagtgagggaggatgactgcgagtgggagcacggttttcaccctcttcccagaggggcgaggggactctccgagtatcatgaggccgaaaactctgcttttcaggtaatttattcccataaactcagatttactgctgcttcacgcaggatctgagtttatgggaatgctcaacctggaagccggaggttttctgcagattcgcctgccatgatgaagttattcaagcaagccaggagatctgcatgatgtctgcacccaaaattacatttatcggcgctggttcgacgattttcgttaaaaatattcttggtgatgtgttccatcgcgaggcgctgaaaacggcgcatattgccctgatggacattgaccccacccgcctggaagagtcgcatattgtggtgcgtaagctgatggattcagcaggggccagcggcaaaatcacctgccacacccaacagaaagaagccttagaggatgccgattttgtcgtggtggcatttcagattggcggttatgaaccttgcacggtgactgatttcgaggtctgtaagcggcatggtctggaacaaaccattgccgatacgttggggccgggcggtattatgcgcgcgctacgtaccattccgcatctgtggcaaatttgcgaggacatgacggaagtctgccccgatgccaccatgctcaactatgttaacccaatggcgatgaatacctgggcgatgtatgcccgctatccgcatatcaaacaggtcgggctgtgccattcggtgcagggaacggcggaagagttggcgcgtgacctcaatatcgacccagctacgctgcgttaccgttgcgcaggtatcaaccatatggcgttttacctggagctggagcgcaaaaccgccgacggcagttatgtgaatctctacccggaactgctggcggcttatgaagcagggcaggcaccgaagccgaatattcatggcaatactcgctgccagaatattgtgcgctacgaaatgttcaaaaagctgggctatttcgtcacggaatcgtcagaacattttgctgagtacacaccgtggtttattaagccaggtcgtgaggatttgattgagcgttataaagtaccgctggatgagtacccgaaacgctgcgtcgagcagctggcgaactggcataaagagctggaggagtataaaaaagcctcccggattgatattaaaccgtcacgggaatatgccagcacaatcatgaacgctatctggactggcgagccgagtgtgatttacggcaacgtccgtaacgatggtttgattgataacctgccacaaggatgttgcgtggaagtagcctgtctggttgatgctaatggcattcagccgaccaaagtcggtacgctaccttcgcatctggccgccctgatgcaaaccaacatcaacgtacagacgctgctgaccgaagctattcttacggaaaatcgcgaccgtgtttaccacgccgcgatgatggacccgcatactgccgccgtgctgggcattgacgaaatatatgctcttgttgacgacctgattgccgcccacggcgactggctgccaggctggttgcaccgttaaaacgcgactaaacgctactgcgccgggggatttattccggcgcacacctctgacgataccaataacagaaggcgggcgttggtaacagcgacccgataccctatgagcatttcaatgactacaaaactcagttatggatttggagcgttcgggaaggattttgcgatcggcattgtgtatatgtacctcatgtattactacaccgatgtcgtcgggctgtctgtgggtttggtcggtactttgtttctggtggcgaggatctgggatgctattaacgatccgattatgggatggattgtaaatgctacgcgatcgcgatggggtaagttcaaaccctggatcctgatcggtacgttggcaaactctgtaatcttatttctcctctttagtgcgcatctgtttgaaggtactactcagattgtctttgtttgcgtgacctacatcctctggggcatgacttacaccattatggatattcccttctggtcgctggttccaaccatcacgctcgataaacgtgagcgcgaacaactggttccttatccgcgtttttttgccagtctggcaggctttgttacggcaggtgtgacgctaccatttgttaattatgtcggcggtggcgatcggggatttggctttcagatgttcactctggtactgatcgccttttttattgtttcaaccatcatcactctgcgcaatgtgcatgaagtcttttcgtcagacaatcaaccgtctgctgaaggaagccatctgacacttaaagccatcgttgcgctaatttataaaaacgatcagctttcatgcctcttgggtatggctcttgcttataatgtagccagcaacattattaccggctttgctatctattatttctcatatgttatcggtgatgcggatttgttcccctattatctgtcgtatgcgggagctgctaacctggtgacgttagtattcttcccacgcttagttaaatcattatcccgacgcattttatgggccggagcatctattcttccggtgttaagctgtggtgttctcctgttaatggcattaatgagctatcacaacgtcgtcctcattgtgattgcgggtattttgctgaatgtgggaacggcgcttttctgggtattacaggtcatcatggtggcagatatcgttgattacggtgaatataaactgcacgtacgctgtgaaagtatcgcttactccgtgcagactatggtggtgaagggcggttcagcctttgcggcttttttcattgcggttgtgttagggatgattggctatgtaccgaatgttgaacagtctacgcaagccctattaggtatgcagtttattatgattgctctaccaactctgtttttcatggtaacgctgattctctacttccgtttctatcgcctcaatggtgacacgctgcgcaggatccagatccatctgctggataaatatcgcaaagtaccgcccgagcctgttcatgctgatattccggtcggtgcagtgagtgatgtgaaagcctgacgtggacaatagctaacgaaaatggcctgatgcgatatgtttatcaggccacgtcttaatgtaatgctttggatttgcaaattttgtagaccggataaggaattcacgccgcatccggcatcaacaaagcgcaagttgttatccggttatcaagccaaagcgccgtagctggcggcaatgaaagcgagcgaggaatatcaccgtcgttaatgcgccaagcagcgcgcagaacatatcggattgcgtgtcccactggtcgccctgggtgccgagaaaatcatccgctccctgacccattgccagcgctgcccaccactcgattaattcatacatcgcgcttatcgccagcgccacgcagcagaccaggaacgccaccattttacgtccgcgcacgtacatcccgcgaacgagaatttctcgtgccaccagtgcaggcaccagcccctggaaaaagtgccccagcttgtcatacggattacgactcaaccccagccattcctgcacctcaaaaccaacggggactttcgcgtaggtgtattgtccgccgaccatcaggatgatggcgtgaaggaaaatgagcgtatagagcagcggcgttaacggataacgtctggcggtggcaagcagtagctgcacgacaataatcaccggtgtcacttccatcagccaggtgagtttgtcatgggccgaaatgccggtataaatcaggattaacgttagcgtcagtgcgctggtgttaagaattaacggcttgagtgtgcgggtcatggtgagttcgcaaatcagggaaaatactgactattcaccagcaagcgtgaaattacaatcgcaaaagaggtggccagggggatcacctggcagcatgctgccaggcgctgggccgaagaggttacttagtgcagttcgcgcactgtttgttgacgatttgctggaagaagtcgttacctttgtcatcgaccaggataaacgccgggaaatcttctacttcgattttccagatagcttccatacccagctccggataagcgacgcactccagatgcttgatgctctgctgcgccagtaccgccgccggaccgccgatgctaccgaggtagaagccgccgtgtttatgacacgcgtcggtaacctgctgactgcggttacctttcgccagcatgatcatgctgccgccgtgggattgcagcagatccacgtaggagtccatacggcctgcggtggttgggccaagtgaacctgatggataaccggcaggggttttcgccggacccgcgtagtagatcgggtgatctttgatgtactgcggaagttctttaccggcgtcaatcagctctttcagcttggcgtgtgcaatatctcggcccacgataatggtgccggtgagcgacaaacgagtggataccgggtattgcgaaagctgggcgaggatctctttcatcgggcggttaaggtcaactttcaccgcttcgccttcaccggcctggcgcagttcttgtggaatgtactggcctgggttgtgttccagtttttcgatccagataccttcgcggttgattttcgctttaatgttacggtcagcggagcaggagacgcccatgccgaccgggcaggatgcgccgtgacgtggcagacggataacgcgaatgtcgtgcgcgaagtatttaccgccaaactgcgcgccaagaccgagtttctgggcctcttccagcagttcctgttccagctggacatcgcggaacgcctgaccatgttcgttcccttccgtcggcagttcatcgtaatagtgagcgcttgctaacttgacggttttcaggttggtttccgcagacgtaccgccaatcacaaacgcgatatggtacggcgggcaggctgcagtaccgagggtacgcattttctcgacgaggaagtttttcagtttgccgggagtcagcagggctttggtttcctggtagagatacgttttgttggcagagccgccgcctttcgcaacgcaaaggaatttgtactcatcgccatctaccgcgtacaggtcgatttgcgcaggcaggttagtgccggtgttgacctctttgtacatgtccagcgccgcattctgtgaatagcgcaggttatcttcgatataggtgttatagacgcctttcgacagcgtttcttcatcaccgccgccggtccacacgcgctggccttttttaccgacgatgatcgcggtgccggtatcctggcaggtcggcagcacgcctttggcggcgatttcggagtttcttaagaattgcagcgccacgtacttgtcgttttcgctggcttctggatcgtgaagaatagccgcaacctgtttctggtgtgccgggcggagcataaaagaagcgtcgtgaaaggcttgctgcgccagcagggtcagggcttctggttccactttcaggatggtttcgccgtcgaagtcggcaacgctaacgtaatcggaagtgagtagatagtattcggtattgtctttccccatcgggaaaggtgcctggtagataaagggtttgtttgacatagcttccagcctgtaactctgtatttgttattcgaaaatggcgtgccgcgtagtcacgggcggcacgcaaagtgcatttataagaacccgtacatcgcggcgaagatccagccgaagacgcacgatacgctcacaccaatcaaccccggcagaataaagctgtggttgatgacgaagcgaccgatgtgggtggtgccggaacggtcaaactgaatcgctgccagatcgctcggataagtcggcaggatgtaataaccgtagcaagccggtgctgaagccacgatgtatgccggatcaacgccgatcgccagcgcgaccggaacaatcgccgccagcgccgcagcctgagagtttacaaacttggaaaccagcagcagaacaatggcataggcccacggatactctttcaccatttcacccagtacgccctgaatttcagacatatgcgcaccgaacatggtttctgccatccatgcgataccgtacaccgccacgatggcgatcataccggaacggaagacttcgttttttgagatagacgcgggattggttttggtcaggataataatcagcgccccggtcagcagcataaacatctgaataaccagtaccatcgacagcggtttgccgccgaaggatggacgcaggtccgaatcagcaccaagaagggcgactacagcgattgccccgaggaaaatccacattgccagccagttgcttttcggcagttttttatccagcagcgtcgcggtatcaccgtaaacatactcacggttttccggtacggagatgaatttctggaactcttcgtctttatccagatctttaccgcggaaccagctgaagataccgatcgccaggataccgattaacgtcgatggaatggtgattgccagcagatcgaggaactcaagatggcgaccatcaaaggtgacattacccagcatcgcaaccagagacacgaccgcaaccgacaccggactggcgataatccccatctgtgcaccgatagaacttgccgccatcggacgttccggacggatgttgttcttaatggcgacgtcgtagatgatcggcagaatggtgtaaaccacatgacccgtaccgcaaagaatggtcagtgtacaggtcacaaacggcgcgacaattgagacatatttcgggttgcggcgcagcagcttctcggcaatttgcagcatgacatcaagaccgcccgaagcttgcaaggtcgccgatgccgccaccaccgcaatgataaccagcatgacatcaactggtggtttacctggctgaaggtggaagacgaagaccagaatgaccagaccgataccgcctaataaacccagcgcgataccaccctttctggcaccataaaacagacatatcagtattatgataagttggatagtaaataacatgtgtgaaccctcgcgataatcctatttaaatttttgctgaatagatcacagtcacgttctgttttgtatgaactgttttcagagcctgactaaatatccgtttggtcgttaccggctttagcaaatacctcacagtgaatattggctgattaaagcagcggcaaatttatgcactgtgataagcggctttttcagagagaaagactctctggcgatgggtttatagtttgtactgcgcagatgttaatgttttgtttgctgttatcttattgatatttatcggtctattttttgttctcagggcagatgtcattaggtttatagattaatctgatctacccatttgtgggtaaaaatacacataatgcgggtgacataatagttaattaacttttgttagcgttttgaaattaaaaacaccgttcacctgaagagatattaatttttagcgatgatggagggataattatatttgatctggcacaagttttactgatgaaggatgtaacttgtgccaggggtattttgcattacggtaataattattacttacagataaccagcgatccgttattggcaatattgtttcagtagtgagtagtgttctgcctgaatacggtaacggtaaactggacgccccgtgacgccataatggatactggtgaacaagatgtggcagttgaccagccagatgaggtatttacggcaggaaacacgcgaaatgttaacctcgttggctagctcgtcggttgaaaattcatagtcctgatgcgcgtcaatccactggcacagtgtgcgtaacgtctgcggcgttaagccttttggcaagcgacgaggatcctgttcgttggagctgctgccgtggattagctgatcaagctcggcctggtcataatactgatgtttttccagcgccattttcttttgccgccagccggtgagcgcctcttcaaagcgggaagcctggaagggtttgatcaggtaatccacgacaccgtaatgcagcgaatctttaatggttgccgcatcggctgcggaggagatgacaatcacatcacttttgcaacgcgcgttatgcaggacaggcagtaaatcgagcccgttctctttttgcatatagatatcgagcaatatcaggtcgataggcgtatcgctattgaagataatctctttggctttctccagcgtcgaggctgttccacagcattgaaagcctgggatttgtgctacgtatcggcgattcagctccgcgaccattgcgtcgtcatcgataattaatacattgatcatctgttcgacctctccccgtcccagggtatctggacaaaaaattgtgtgaaaatcccgggttccgattccacggcgatgctgccgccgagattttctacctgttgtttgacaagtgctaaaccgacgcctcgctcgcttccttttgtcgagacacctttgtcaaaaatgtgatcgattttatcgggtgcgatccccggtccatcatcattaacttcacagtgcagccagccgtgacggtagtgcaatgttacgctaatttcgcctccgggttccggccctaatgcctccagcgcgttttctatcagatttcccaacgtggtaatcagcgtcgcgacctggtcctcactgccgctgtctggcagctggctttcactgtttaaaatcagcgtatggcctaaatcggtcgcgcggttaatcttgctgattaaaaaaccagcgataaccggagatttgatcttacccagcagagagccaatctcttcctgatagttattggctgttttgagaatgtaatcttccaactgcttataactcttcagatgcaataatccgagaatcacatgcaatttattcataaattcgtgggatcgttcacgaagtgcgtcagcatagttgaccagaccgtcgagtcgctgcatcagtttacgtacttcagttttgtccctgaaggttgaaatggcaccgatgataacgccattactgcgcaccggaacggtgttgatcagtaatagccggtctttaatcgtaatctcttcgtcgcggcgcggggtaccgtcgcgtaacacttccgagacatctaccacctgtgaccatgagtggcttagcgtcgacagtttctcatcgtcctgcgacttacggtaattcagcaattcttgtgcggcatcgttgatcagcgtgacctcgccgcgatcgtccacggcaacgacgccttctttgatagactgcaacatggcctggcgttgctcaaacagcgtggagatttcgtagggttccaggccgaaaaggatttttttcagtaccttaaccagaatgcaggtgccaatcagtccgaccagcatgccaaataataccgaccagataatgctccagcgactgtcattgatctgttgggtcacacggcttaactcaaggccgatcgccaccacgccaatttgtttatgattttcatcgtagatgggggtaaatacgcgtaaagcctgcgccagaaaaccgcgattgatagcgacattttcttcgccattcagcgctttaaggatgtcatcacctttaaatggctgaccaatacgctgggcttcaggatgcgagtagcgaagactttgcatatcggtaacgacaataaacagcagatcgttgcgtttgcgtacggcttccgcgatggcctggatgccactctcctgcggttttttctgcaagccctgacggatttccggcgagtcggcgagggtacgcgccactgccagtgccttgttggctagcccatctcgcgtcatatcactgatttgcgagaagtaaatcagatgcaccaccaatagcaccgagaacagtaccgcactgaccattaagatcactgtggtactcaatttcatcggacgtttgcgtaacatgcggtagggcaatgaatgtctcatcagcttccttgtgtgacaaatttcttaagcattatctctgatgaggcgggtaattcaaagggagtaagaatgattggctatataggggaagagactctggcaacggaaactgccagtgctgtatgaagattccggggctatgcttatagcgataatcatactgatgagagagggaaggtcatggatcaggcgctactggacgggggttatcgctgttataccggcgaaaagatcgatgtctatttcaacactgcgatatgtcagcattctggcaattgcgtacgtggcaacggcaagttatttaatctcaaacgaaagccgtggatcatgccggatgaagtcgacgtcgccactgtggttaaagtgattgatacgtgcccgagcggcgcgctgaaataccgtcataaataagcgagggtaaaatggaaatacgcgaaggccacaataaattttacattaatgacaaacaaggcaagcaaatcgctgaaattgtctttgtgccgaccggagagaatttagcgattatcgaacataccgatgtcgatgaaagcctgaaagggcaagggattggtaaacagctggttgcgaaagtcgtggaaaaaatgcgtcgggaaaaacgaaaaattatcccattatgcccatttgcgaaacatgaatttgataaaacgcgggagtatgatgatattcgcagttgatgggagagtacagagtcacgatatttttcattctctccgcgatgtgatgcaggagagcatctgaagggtagggggatgcacaaagaatgggcagagagcgcgtttttttgtcccaagtcatcccctttactgagcaaaaaaaagaatatctcctatatgagaatcatcaatcggggttaataagttttgcgtccccagagcgtttaatattgataggagtcatattatggaaggtaaaaacaagttcaatacttatgttgtttcttttgattatccatcatcttattcctcagtgttcttaagattaagatcattgatgtatgatatgaatttctcctctatcgtggctgatgaatatgggataccacgacaattgaatgaaaactccttcgcaataacgacatcgttagccgcaagtgaaatcgaagatttaatcaggctcaaatgcttagacttaccggatattgattttgacctcaacattatgacagttgatgactatttccgtcagttttacaagtagccaggaaggataagaagaacataaaaaatggcactattctctaaaatattaattttttatgtgattggtgtgaacatatcctttgtcattatctggtttatctcacatgagaaaacacatattcgtttacttagtgcattcctggtcggaataacctggccaatgagtctgcctgtggcattacttttttctctcttttaggagctgtagttgagtggacccgctggttatcgtgaaacgaagcgtctctcctcaaaactggatttgcggaacgatgaacgaagcagtcgcctgactgcttcgttcattaaagtgaaatttatttctgtgggcgcatcgccgggaagagaataacgtcgcgaatagtatggctgttagtaaacagcataatcattcggtcgataccaatacccagaccagcggttggcggcagaccatattccagcgcagtcacgtaatcttcgtcatagaacatggcttcgtcgtcacctgcagctttagcattaacctgttcctggaaacgttcagcctgatcttctgcgtcgtttaattcgctaaaaccattaccgatttcacgaccaccgatgaagaattcaaaacggtcggtgatttccgggttaacatcattacggcgtgccagcggggacacttctgccggatattccgtaataaaggttggctgaatcagatgtgcttctgccacttcatcaaagatctctgtgacaatacgtcccaacccccagcttttctctaccgtaataccgatagattcagctaatgctttagcagcatcaaaattatccaggtcggccatatcggtttctggacgatattttttgattgcttcgcgcatggtgagtttttcaaacggtttgccgaaatcaaacacatgctcgccataagtgactttagtggtacccagaacctcttgtgccagggtgcggaacagtgactctgtcagttcaatcaaatcgtggtaatccgcatacgccatgtagagttccatcattgtgaactcaggattatggcgaacagaaataccttcattacggaagttacggttgatttcgaatacccgttcaaaaccgcctacaaccagacgtttcagatacagctccggcgcgatacgcagatacatatctaaatccagagcattatgatgggtaataaacgggcgagcagatgccccacctggaattacctgcatcatcggggtttctacttccataaagccgcgcgcgaccatgaattgacggatagcggccagaatttttgaacggacaacaaacgtttgacgggatttatcgttagcgatgaggtccagataacgttgacgataacggacttcctgatcctgcagaccatggaatttatctggtaaaggacgtagtgctttagtcagcaggcgcagctcagtacagtgaatggaaagctcacccgtttgcgtcttaaacagcgtaccgcgggcaccgataatgtcacccagatcccattttttaaactgatcgttataaacaccttctggcaggctatctcttgcaacgtacagttgaatacggccaccgacatcctgcaacgttacaaaggaggctttccccatgatacgacgggtcatcattcggccagcaaccgagacttcaatgtttaaggattccagttcctggttatccttcgcatcaaactcttcgtgcaactggtcagaggtatggtcgcggcgaaaatcattgggaaacgccacaccttgctgacgtagtgccgccagtttttcgcggcgatttctcagttcatcgttaaaatcaatagcctcattggctccccgtgtttcttgttcagacattttggttcctctaaatccagctttcaatttagcgtagataaagagacagatcggtacactgtattatctgcctcgactattagtaactcagtttatcttatcgaaactaacgcttacctcaagttgatatcactaataaataaccatcaaaatggtttaaatgacttattaatctcgatttgttagtgttataaactgaaagttaatttattcataaccaattgtttttacgacagttaatcgttgctctcctgtatcatattcgtcggcgtgctaaacagaaaacgggtagcaaaggccaatacgacgatgatcgcgacacaagccaacgtccactctcccatctgagaaaagaatcgctggtaagctgcaattgccataccgctaatttgcgactctgtcgtctgctgtgccacgacgcctgccagccagttggcgaccgcgcctgttgccagcatataaatcccggttaatacgccagacattttcagacgcgtgatttgcgcaatcgccaccgggtcaataaagagttcggcaaagcccattagcgccagcccggatatcatcacgcccattgacgcttgaccgtcagccgctgcatgtcgggcatcaaatgccaacaacataaagccacaagccatcagcagtaagccaaaggcaaacttcagccagacgcgcaatgttgagttgccgcggctttctggcgacgccagccaggccagtacaaccccagcgagcatcaccgcaattgcattcaccgactggaatagtgctgtaggtacttcaatattgaatgcctgacgattcacaaagcgatcgataaacaagctgatggtactgccgccctgttgtgccagtacccagaacaatgtcccgacaaacatcaacaatacaatttgccaaagagcacggcgatgttcggggaatttgatcatcatgcgggcaatgatttgtgcggcaatgaggcaaacgatcgccagcaaatatccggaccagtcgttctccagcagcagagtaaaaaatactggggctaaacagagcatcaccactaaccagctccatactggtaaggcaaatttgacactagtgagcgcttttttatccatactacgtgtggactggaaatgacgatgaccgcttaagaaaatcaacaaaccgataaacatgccgccacccgcaagggcaaagccaacatgccatccataccactgagcagccaggccgcaggcgattggggctgcgatagaaccgatattgcccgcagcatacagcagcgaaaaaccgccatcacgtcgatgatcgttctcgtcgtagagctcgccaagcaaacagctgatgtttgatttgaataaaccgtagccacaaataatgattgccagcgccagatacaggctaaaggttgaatttgtatcaatacccagcaccacatggccaagggtcattaacagcgcgccggcaatcactgcagtgcggttgccgagcaggcggtcggcaagccagccgccgagaataggggtaacgtaaaccagagaagcatatgcgctgaacaggctgatggcatggttatcatcaaaaccaagctgatgggtgagatagagaatgagtaaggcacgcatgccgtaaaaactgaagtactcccagatttggatcgccacgatatagtatatcgcgcgcggctgtgagggtgttttcatgtgttctccttatgagcaaaaaagggaagtggcaagccacttcccttgtacgagctaattattttttgctttcttctttcaataccttaacggtatagcggccatcagcctgacggtatgcaccgtgaatatcggtttcaaagcccggatagtgagcgccgatttcacacagcatctgcaggaactccagaaccggacggctttcttcggtgatcatttcacccggcattaccagaggaactcccggcgggtacggaaggatcatattggcgttaatacgacctaccatttcgtcgaggtaaacttcttcggtcataccgtgcagctctttctggaatgcagcatacggagtcattaccatcgtcggcagcacttcaaatgcgcgatacatcagatccggcagattgtggtgaacaatcagtttgtggatattctgagccagttcctgaatacgcatgttttcatagaattcaggatcttcacgatacagagacggcagcatgtttttcacacgcaggttcaggtcgaacgcacgtttaaagtcagtcagagcacgcagcaggctcagtgctttggtcttatcgataccgatgctgaacaggaacagcaggttatacggaccggttttctcaacaacgatgccatgttcgtcgaggtatttcgccacgatgctggccggaataccaaagtcgctcatggtgccgtctttttccatccccggagtcagcagggtgactttgatcgggtcaagatacatgtgctcgttatcgatgtttttgaagccgtgccaggtgctgtcagaacgcagcggccagcattcagtcgtatcgatatgatccggctgccatacatcaaagaaccagccatcagattccgttctcagacgtttgatctctttacggaatttgatcgcacgttcaatagaaccgttgatcagacgcttacctgcattgcctttcatcatcgccgcagcggtttcagtggacgccacgataccgtagtgcggagaagtggtggtgtgcatcatgtaggcttcgttaaaggtttcttcgtttacgtcacctttaacgtggatcatggaagcctgagagaacgccgccagcagtttgtgagtggactgggtttcgtaaatcactttcccttctacacggccaccgctcataccgcatttaccttcgtaaatcggtgagaagttggtgtaaggcacccacgcggagtcaaagtggatggatttcacatccagtgttttcttgatgaagtcggtgttgtacagcagaccatcataggtagagttggtaattacagcatgtaccggccaggttgcgtttggtgtttctttcacgcgcttagcaatggtagcgtgctggaattcactctgtgggataccaccaagaataccgtaagcgttacgggtcgggcggaaatagattggcgtaacatcgctcatcatcatcaggtgggtcagcgatttgtggcagttacggtcaatcagaatggtgctgcctgctggagcagagtacataccaacaattttgttcgcagtggaagtaccgttggtcaccatgtagctgcggtctgcgttaaagacgcgagcgatatactgttctgcttctttgtgtggaccactgtgatccagcagagaacccagttcagatactgaaatggaaatatcagatttcatggtattcggaccaaagaaatcatagaacaggctacctaccgggcttttctggaatgcagtaccgcccatgtgaccaggagtacagaaagtatatttaccttcacgaacatatttaaacagtgctttagtcagcggaggcagaatagtgttgatatattcgtcagtggtctgcttgatcttattagcaatatcttcagcagcacccagcgcatattcaaagaagctaatctgtaaacgcaggtcattcaggcttacatcgagagtggaatacgtattagcgaacgcgtacaacggcaggttctcgttcattttgctaatttcttcgcacagctcgagattatatttatcccagtcaaaaataacgccgcacagacgcgcattgttttcgatcagttttaataagtcgtcacggtcgttcgggtaaacaatctggaagttcagacgttcaagcgcgcgatgaagttcacggatgggttcttctttaaaataaacccccatgtgattcaatattgcaataacgttcatagtcatatctccaggtaaaaaaggcccctcccaacacatgggacaaaatgaaaggaggagcctcggaaaatacttttaattaatgtgcgttagacgcggtgtggttatccattgagtggctctggcgctcgtgcattttgcgagcgtagaacatcaggataatcaggctgacgatgaaggtacctgccagctcgaaggagcttgcgcccatcagcgcgatgaagcagaacacgcaacccagtacagagcagatcaggctgacaaagttgcggatgttaacgccttcaaaacgaatcaggtcaacgcaagagtagaaatacggcagcatagtcagcagtactgcgataccggtcagttcaccgaacaggtcagatgctttaccaccggcagagttcatcagagtgataaggatcatcagggcagtcattttcactgcagccagcagcagaccttttttcggaataccgttgctgtcgacttcaccataaactttcgggaagttaccgtcgttagcggcacgtacacctgcctggcctaccaacatcatccaggagcccagagaagtcaggcacgcaaaggcggtgaatgcagaaaccagcggcgcagcccagttaccgaggatagttgaagcactgattgcaaacggagcaccggaagccgccattacagaagacggatacataccggaaagcacctgagtcgcagcgatgtaaacaatacctgctaaaccagtacccagcatggttgccagcggaacggtacgtttcgggtttttaaccataccagtacttacagctgcggattcaacacccacgaaggcccacaggcagagcagaatacttttaatgatcgcatgaccatcagtggtatccgcagtattccagttagctgcataagttgccgcatcaaaccaatgccagccaacaatagcagtcatcaccacaggaataagaaccagcaccagaccaatagtggttaaacggcttacccaagtaccgccgagcatatttacaaaggtaaatacccagacgatagcaatacaggcgatacccgccggaacaggatcatttaatactgggaagaaggtggaaagataagatacagcggtaataccaatcgccaggttaccaatccagttagcatggtaataaagaacacctgtctgaaaaccaaatgcaggggaaatttctccggcataagcaattgggccaccttgttgcgggttttttgttgccagtcgggcatatacatacgccagcgacattgcaccaataatagagataatccaaccccagatagcaataccaccgatacttgctaggttcgcaggtaataatgcaataccgctccccatcatattaccggcaacaacaccggtacaggcaaatagcccgatcttcttggcagaactcatgctcttctcctaatttcatttttgaatttggagtccgggtcatgatgtataactatttcctgaccagaccaaactggcgataagattactcacgaaaaaaggattaatcctaaagattaggtgaaataacacaaaagtttctgtaagtgagaacttgaggttttttattaacacatcaggatcgcaagttgatatcatgaaaagataaacatttaatgtttacaatggattgcgtgacattctctggttaaatttatgtaataaaaattatgcggcaaataaattgccgcaacatattataccaacaggaacatacaaaaactcaacaacaaatatttccgagcataaatcaacccggagttacttattctgaagcaagaaatttgtcgagataaggtacaacataaggaacagaagtctggaatataccattttcaatccagtaaagggtgtttgcccctgggcgtaaattaaaggcggtgagatatgcatcagctgcttcccggttcatccccttcatttcataaaccttgccaagcaacacataatttagccaggacatttcaagatcaatgccagtatttatcgcctggtaagactcatctgttttaccttttaccagagcactgaccgcttttatttgatatataatggacaggttgttcaattccggcagtgtaacaatgttatctatttctgtgttcagtgctgctaattgtttttcatctaaaggatgttgagaatggcgcacgatatcaactaatgctttttctgctctcgcgtaggtaaattctggggatgattgaacaatctcacctaataattcactggcacggttcaatgatttatcatcgccatgcagtaaataatcatgtgcctgataaaaattagttaataacgcaccacgatgcggcaaaattttctggagcgtctcctgcattcgttgtggccacggttggtttaacgcttttgataaactctccagtaaatcattttgaatcgccagctgattaccgttagtgatgacataacgtttatccagcatggttgaaccatctgcattgtctaccaattttatcgacataaagcattgttgagcacggtattggcgctgattaacaaacgcaatagataatgttttaccggaactgctcggttcatcaatgttgtagttgattttgtcatgcaccataaaggtggagaaggtgttaagtgatgtcgccaccaaatcacccacgcctatcgcgtaagagagctgatacggggaactccagctgttacaacttttatttaccatattaatgtcaatatcgcgtggattgagcaaaatacgcgatttgctcataggaagacgtgtatcaagacttgaaaacgctaccagtgctacacagatacctaacgacaacaggaaaaaaaaccatacccaaaaggtagtgaatcgtttgcttttaactggggattgttcaggtggcgttgcggtgttttgaatgttaagactgtgggagggagaatctgtggcaggaaccgcctctggtatagggggaggcgaagatagcattatttcctctccctcttcttcgctgtaccagataaccggcaccattaatttatagccgcgctttggtacagtagcgatatagacaggactatcttcatcattatcttttaatgacttacgtagttctgagatactctgcgtcacaacgtgattggtgacaatacttctcttccagacattatcgataagttcatccctgctaagtacttcgccactgtgttgagcaaagaaaaccagaagatcgattaatctcggctcaagggtaagttgacgcccattgcggctaatttggtttatggacggagtaacaagccattcgccaacgcgaactacaggttgttgcataatagaaactcattcgaaaagggaatgatgcaatgataattgccacaacctatttttaccatctatagatgggtttatttacatattattggtgaatgcaagacgttatttttaccagccataaacttcttgattacatagtattacgaaaggattttactgagaaccagaagtaatattccttaccatcaaaattcatcatctttgccaaagaaaaatgttcagaaaataatccatggaaaattgtccggagcacttactattttaatggattgttagtctttgcatgagcaagcgaactgatacatttctctttgttctcattcagaaaatctcatcagtcgccgttcagaccggtgttgtgctttatggatgcgttacgctcctgatgacgtcatttgacgttcaacagcatcacggggccgcacgacatttcacgtcagttagtgctatagctcaggaacaaattttcccgaattgggatatgcccgcaaattgctggtgatgtggggagaatctggttgagttcggtagaattgatttggaggcagaacgcttaaatcgtggcgtcctgaaacgaaaaacggacctccgtggaggtccgtttatatgaatttggtgcccggactcggaatcgaaccaaggacacggggattttcaatcccctgctctaccgactgagctatccgggcaacggggcgcattaaaccgtaatctgcacatctcgtcaacctaatttcagtaaaagcgattcaactgcttaagattgcggcaaatcgcttcttttctgtgtttctgtcaggtcaatgcaccaccctggcggcagcgggcgaagcgcaggatatcttccgccagccgatgtgcagtgtcgacatccgcctggctacgattcaccagcattcggcttaaacagccttccagcaccagttccatctgctttgctaccatcgccggatcgtcaacttccagtgtggttaacagttcgtgggtgaaatcgtaggccgcgcttttttgctgatcggccagttgatgaatagggtggccaggatcgggataaaacgtacaggcagcgataaatagacagcccggatagcggttgtttttaacgcactccgataacgcctgataacgtgccagcagcttttgttcggcggtttgcgtttcgtccagcatcagctgacgacgccagacatctatctgttggctaagataacgcagcgcatcgtagaggattgcctctttgtctggccagaagcggcgtagctcgtccagtggataatccacacgttcagcaaccatctccagcgtggtgttggcaatcccttgtaattctaataatttcagggcttctcccagtacatcttcacgttgcacgctattttcctccgtctttcccactgcaagtgtcgttcacggttggcgatcgcgcaaatgtgcgctgaaggtttcagcatccataaagcccgtgacgcgtgcttgtggatgctcctggccttgtccgtcaaaaaagagaattgtcggtaggccaaggacattaagatgctttaacagcgccacatcttgtgcgtcgttggccgtgacgttggcctgaagtaagaccgtgtctgctaacgctttttgcacctgcgggtcgctgaaggtgtatttctcaaactctttacaggcgacgcaccagtcggcataaagatctaacatcaccggtttgcctttggcttcaacgagcgcctgatttaactcatctaccgttttgatttgtgtaaagttgagatgcgtctgagtttgcgcggtatgcgtcgcaccaaatgcccaatcctgaagtgggcgcacgctaaccaatgccgctgccagcagaataatttgcacaatacgcatccagccgcgtttagcctgtaggctggtgataaaggcccagccaaagaatgcgacacccagcgccgaccacaagcgtaatccccatacatcaccaatcactcgctccagcaggaagaccggcagtgcgaggatcacaaaaccaaacgcggttttgacttgttccatccacgggccgcttttcggcagcaagcggttaccaaagacggtaattagcatcagcggcaggcccatgcccaacgcatagagataaagcgtgccgccgcccagccacatgttcccgctttgggcgatatacagcagaatcgcgctaagcggtgcggtggtgcatggtgaacagatcagtccggcaatcgcccccataacaaacacaccgccaggtgagccgccctgttggcgattgctcatcaacgtgagacgtgtttgcagcgaagaggggagttgcagggtaaacaagccaaacattgacatcgccagcaaggtaaagacgatggcgaggccaatgagcacgtatgggtgctgtagcgccgcctggaactgtaaccctgcggcggcaaccaccagacccagcgccgtgtaggtcagcgccatcccctgcacataaataaaggtcagcaacaatgctctggcagtggagagccgctgtttaccacccagcacgatgccagaaatcagtgggtacattggcagcacgcatggcgtaaaggcgataccaataccgatcaacaacgcccagagcgcggaaaagggcaattgcgcggtgggctgctcttgctgcggaacagacacaggctgtggcgctgcgttgttggcgaccacttcgcttaacggaacggttttggtttctggcggataacagaaaccggcatcagcacagccctggtaggtgacagttaacgtcgctcccgcactcgcctggttgatggtgacgggaagcgtcagccgatcgcggtaaatctcgcttttgccgtaaaactcatcttcatgccagacgccttgcggcagctgcacgtcggcaattttcgcgtgttccggcgtaatgcggatctgtttacggtagaggtagtaaccgtctttgatctgccaggtcagattaaggtcatgttggttttgctgaaaatcaaaagcaaaggcttgatccgcggggacaaattgtgaacgtcccggcgcgtcgaataatccggcaaaaacggaagtgctgcaaagtagcaggatcagcgtaaagatgcgttgagccatgagaggtaatctgtgtctccgtgtgtaacaggtaaaaccagaagttccggggtttgatatggatgatgagacttcaggcattccagcagtgcctgctggtgagatacggtagtttttaaaatcatctgcacttcgtattcttgctccagcttaccttcccagtaatagagagaggtagcgccggggatcaaggtcgcgcaggccgccagtttttccgccagcactttggcggctaaatcctgggctgtcgcttcatctggtgccgtacatagcaccacgacagacgcggtattcgaacttttttcatcaagcataaacacctcgcaagaacagatggaaccgcaagagagaggtcactatacaacggacgggggaaggatgttagtcggcgggaaagaaagcggggcgtgaacgccccgcgattgatcattacagcatgaagctacccagcacgaagccgaagcaaacggccagggcaacacccagagtacccgggatgaagaacggatggttgaagacgaatttaccgatacgggtagtacccgtgtcatccatctgtaccgcagcaaccagcgtcgggtaggtcggcagaatgaacagaccagacaccgcagcgaaagaagcaacagcggtcagcggtgaaacgttcagtgccagagccatcggcatcagtgcttttgcggttgcagcctgagagtacagcagagcagaagcaaagaagaagatgacggccagcagccacggatgaccctgaatcacttcaccagcggtatctttgatccagtcgatgttgttggaaacgaaagtatcgcccagccacgcaacacccaggatacaaatacaggcgctcatacctgctttgaaggtgctggagttgaggatgttgtcggtatcgactttacagataacggtggtcagagttgcaacgctgagcatgatgatcaggattgcgttggtggtgttcatcagcggtttttcaaccagacccatgcttgggctgttgatgattgcatagataaccacgccaactacgcccagcaggaacagccagacggacgtttttgcaccggatttgatttcaatctgcttttcaccgcgcagttcaaccaggccctcttccagacgcttgcgataaatcggatcgtcagagagtttggagttgaacagcatagtgaccaggaaggacatcaccagaaccgccagcagggtggacgggatgaccacggagagcagatggaggtagctgatgccatgaccttccatcacggaagacatgtaaaccactgccgctgagattggcgatgcggtgatcgcaatctgcgcggataccactgcagtagacagcggacggcaaggtttaacgccttgttccttcgcaacttcagcgataactggcagtgtcgccagagagatgttgccagtaccagcaaagatagtcaggaaataggtcacgatcggtgcgaggatcgtgatgtatttcgggttacggcgcagcagcttttctgtctgatgaaccagatagtccagaccgccagcaacctgcatggcagaaatagcggcgataaccgccatgataatggagatgacatcgaacgggatgttaccgggtttaacgccaatagcggcaagaaccagcacccccaatccgcctgcaaaaccaatacctattccccccaatctggcgcccaagaagatcgccagcaaaactatgatgagttctacaactagcatattagccttccttgttttttaacaagttgatattagattgttatttttaagttactgctcacaagaaaaaaggcacgtcatctgacgtgccttttttatttgtactaccctgtacgattactgttcgctttcatcagtatagcgttttgctttgtaagccgggtgcatcagattctgtacggagaaaatatcgtcaagttccgcttcagtcaacagaccgcgttccagaacgacttcacgtacactcttaccggtttcggcacagattttacccacgatgtcaccgttgtggtgaccgatgaacgggttcaggtaagtaacgataccgatagagttgtaaacgtaaccttcgcacacttctttgttagcagtgatgccgttaatgcatttttccagcaggttgtagcaagcgttggtcagaatgtgaacggattcgaacatggcctggccaatgaccggctccataacgttcaactgcagctgacctgcttctgctgccatggtaacagtggtgtcgttaccgatgactttgaagcatacctggttaaccacttccggaacaaccgggtttactttagctggcatgatggaagagcccgcctgcagttccggcaggttgatctcgttcaggccggcacgtgggcctgaagagagcaagcgcaggtcgttacagattttggacatcttcacagccaggcgtttcagcgcgccgtgaaccataacataagcgccgcagtcagaggtcgcttcgatcaggtcttcagccggtacgcatgggaagccagtaacttcagccagttttttcactgccagcggagagtactctttcggcgtgttcagaccagtaccgattgctgttgcaccaaggttaacttccagcagcagttcagcggtacgttggatgtttttcacttcttctttcagcaggatgctgaaagcgcggaattcctgaccgagggtcatcggtactgcgtcctgcagctgggtacgacccattttcaggatgtcctggaattcgacagctttacgttcaaagccttcacgcagttggttaatcgcatctaccagcttaatcagggaagagtaaactgcgatacggaaaccggtcgggtaggcgtcgttagtggactgacatttgttaacatggtcgttcgggttcaggtactgatattcacctttttggtgacccatcagttccagaccgatattggccagcacttcgttggtgttcatgtttacggaagtacctgcgccgccctggtagacgtctaccgggaactgatccatgcattttccgttgttcaggacttcatcacatgcggcaatgatggcattcgctacacttttaggaatggtttgcagctctttgtttgccatagctgcggcttttttaaccattaccataccgcgaacaaattcaggaatatcactgattttgttgttgctgatatagaagttttcaatcgctctcagagtgtgaacaccatagtaggcatcagctggaacttccctggtacccaacagatcttcttcgatacgaatgttgtttgacatgtgaaccttctttttcaagctgccaatgatttgctttaaacacacagaatatatgtggtttcgaatgtttttcgaccgacgattatcccctgcatcgaccgaatacccgagatcatatgctgcttgaggatttctaccgtaatctggatcactttaagtgtcggtttttaccccttaattattaatttgtgaaatagatcaccgctttgggattactaccaaaaatagttgcgcaaacatcttgaaattttgctaatgaccacaatataagctaaacgcgattcgcaacccattcaggtagccggggttaaccggctgctattacaggagaaacctttgcgctggttaccttttattgccattttcctttatgtctatattgagatttcaatctttattcaggttgcccatgtattgggggtattgctgaccctcgtgctggttatattcacgtcagttatcggtatgtcactggtacgtaaccagggctttaagaatttcgtgctgatgcagcaaaaaatggcggcgggtgaaaacccagcggcggagatgattaaaagtgtttcgctgatcattgctggtttgctgcttttattaccgggcttttttaccgacttcctcggtcttctacttttattgccgccggtgcaaaagcatctgacagtgaagttgatgccgcatttgcgcttttctcgcatgcctggcggcggttttagcgccgggaccggtggcggtaatacttttgatggtgagtaccagcgaaaggatgatgagcgcgaccgccttgatcataaagacgatcgccaggattaatgtcgaaacgccggattatgtggttatgccattttccggcgtttttcgttttggcagcaacagccataaccccgccagcatgatcagcgcatagagacttttccagccgaccattgccagtaacagaacgcataacagcccgccaaccaccgccagtagtcgataacgtccttgcaataatttacagcctgccagcatgcataacagataaatcataataaagatgccattggcataaataataagagcgtccagattgatctctaaagcatgaatcaccaaagtgctcaccacacagcagccgagcaccgcattgagggcattattcgggatatggcgagaagagaggcgtgccaggtagtggtcaggattatgttgcgcctgcgaccagaccaggcgggcgaagctctgtatataaatgttgagactggcaaagcaggccagatagccaatcacgcaggcaatccataacgctcctacaccgaacaactgcactacaatttttggaagcgatgctgccgccgccattttttcaccataggcgtcgaagtgtaagacgactaccgtacagccccagtagactaatcctgccagcagcagaccaatcatcaaagcacgaggaaaatcacgctctggatttttaaattccgaggcgagatgggcaaatgcctccagaccgacaaaacaccagaacatcactgataacgcagcaaataacccggtaagttcgatattaccaggtgccggaaaggggatattcgcaggtttgatatcgcccgcccaccagatagcgacaatcagcgcgacgataagtccggcaataacggtttgtagattagcactggaactggcaccgcgagtaccgatataccacaccagcgccagcgtaccgagttctgccaacaacagttgccagctatgccagccaaacatcgcctggccgaacccggcggcaatttgtagtgcggcaggcaaacccacgggaatgaccgataaaaacagccagccggtgactcgctcaagccgcgaaccaaacgccataccgacgaagtgcgcgacgccgcctgcgctgggatagtggcgacccagaatcgcaaacacaatcgcaatcgggaacactaagataatcaaaacgggccacgcccacaggctgttattgcccgctaccagcgcagctaacgcaggaacggcaaacacgccagtgcctaataatgacgtcgatagcaggccaatgccctgggccagccccagttcttgtttgagtccactcatgggttgatgtccgattgcgcccaaattttgggcaactgcgtagattttcgatggtagcacaatcagattcgcttatgacggcgatgaagaaattgcgatgaaatgtgaggtgaatcagggttttcacccgattttgtgctgatcagaattttttttctttttcccccttgaaggggcgaagcctcatccccatttctctggtcaccagccgggaaaccacgtaagctccggcgtcacccataacagatacggactttctcaaaggagagttatcaatgaatattcgtccattgcatgatcgcgtgatcgtcaagcgtaaagaagttgaaactaaatctgctggcggcatcgttctgaccggctctgcagcggctaaatccacccgcggcgaagtgctggctgtcggcaatggccgtatccttgaaaatggcgaagtgaagccgctggatgtgaaagttggcgacatcgttattttcaacgatggctacggtgtgaaatctgagaagatcgacaatgaagaagtgttgatcatgtccgaaagcgacattctggcaattgttgaagcgtaatccgcgcacgacactgaacatacgaatttaaggaataaagataatggcagctaaagacgtaaaattcggtaacgacgctcgtgtgaaaatgctgcgcggcgtaaacgtactggcagatgcagtgaaagttaccctcggtccaaaaggccgtaacgtagttctggataaatctttcggtgcaccgaccatcaccaaagatggtgtttccgttgctcgtgaaatcgaactggaagacaagttcgaaaatatgggtgcgcagatggtgaaagaagttgcctctaaagcaaacgacgctgcaggcgacggtaccaccactgcaaccgtactggctcaggctatcatcactgaaggtctgaaagctgttgctgcgggcatgaacccgatggacctgaaacgtggtatcgacaaagcggttaccgctgcagttgaagaactgaaagcgctgtccgtaccatgctctgactctaaagcgattgctcaggttggtaccatctccgctaactccgacgaaaccgtaggtaaactgatcgctgaagcgatggacaaagtcggtaaagaaggcgttatcaccgttgaagacggtaccggtctgcaggacgaactggacgtggttgaaggtatgcagttcgaccgtggctacctgtctccttacttcatcaacaagccggaaactggcgcagtagaactggaaagcccgttcatcctgctggctgacaagaaaatctccaacatccgcgaaatgctgccggttctggaagctgttgccaaagcaggcaaaccgctgctgatcatcgctgaagatgtagaaggcgaagcgctggcaactctggttgttaacaccatgcgtggcatcgtgaaagtcgctgcggttaaagcaccgggcttcggcgatcgtcgtaaagctatgctgcaggatatcgcaaccctgactggcggtaccgtgatctctgaagagatcggtatggagctggaaaaagcaaccctggaagacctgggtcaggctaaacgtgttgtgatcaacaaagacaccaccactatcatcgatggcgtgggtgaagaagctgcaatccagggccgtgttgctcagatccgtcagcagattgaagaagcaacttctgactacgaccgtgaaaaactgcaggaacgcgtagcgaaactggcaggcggcgttgcagttatcaaagtgggtgctgctaccgaagttgaaatgaaagagaaaaaagcacgcgttgaagatgccctgcacgcgacccgtgctgcggtagaagaaggcgtggttgctggtggtggtgttgcgctgatccgcgtagcgtctaaactggctgacctgcgtggtcagaacgaagaccagaacgtgggtatcaaagttgcactgcgtgcaatggaagctccgctgcgtcagatcgtattgaactgcggcgaagaaccgtctgttgttgctaacaccgttaaaggcggcgacggcaactacggttacaacgcagcaaccgaagaatacggcaacatgatcgacatgggtatcctggatccaaccaaagtaactcgttctgctctgcagtacgcagcttctgtggctggcctgatgatcaccaccgaatgcatggttaccgacctgccgaaaaacgatgcagctgacttaggcgctgctggcggtatgggcggcatgggtggcatgggcggcatgatgtaattgccctgcacctcgcagaaataaacaaacccccgggcagaaatgtctgggggtttttcttttggtcatctttctagtataagattcagacacggacgacgcgagtggcgtccagctcattgattatggggaataacatgcacgtaaaatacttagcagggattgtcggtgccgcgctactgatggcgggttgtagctccagcaacgaattgagtgctgccggtcagagtgtacgcattgtggacgagcagccaggcgcagagtgccagctgattggtactgcgacaggtaagcaaagcaactggctttccgggcaacacggagaagaaggcggttctatgcgcggcgcagcaaacgatctgcgcaaccaggcggctgcaatgggcggtaacgtgatttatggcatcagtagcccgtcgcagggaatgttgtccagttttgtcccgacggatagccagattatcggtcaggtttataagtgcccgaactgatgtgatccagaggctgggtgacaaacgtataattgcctgatgcgcttcgcttatcaggcctacataaggcattgcaactgattgaatgcttgagaatttgtaggccggataaggcgtttacgccgcatccggcatgaccaacgatcacgttatcagtcatttcaggctggatggctccagcctcgcattagcaaagatgagattatttcgcctgtggtgcagttttgctggtggattgaacacgtaagtgatgcagcgcgcgtaagcattgatcctgggttagcggttgggcgttattcgccgctacggtgcgaacatagacctgacatggcacacccgcgagttttttcagtcgtgggctgaaatcaagcattcggcgagtgatcgcttctatttctttacccggcgttgcttcacgcgttttcaccactgcgccgctaaattgttctttgccactttcatctttaaagcggtaaagcaccgccagataatggtcgaacaagttatgtttccattccggttgggaataggtgtcatattccagattgccattgtcctggcagtcaacgtcgtataacggcaggaaatctaacagtgaggtaatacgtaatgccagttcacgcatttccgcattattaattgcatgaatgattgctcgcgccagcatttcaatctgcaactcattgacgactaactcacatttgctaccgtcatgtagcgttaatacgaaggtaagattttcgccttgattatcggtaagttccagcgtgttaacccgacgattaatatcggcatttttaagctcatcaaccagaatttctgggatgttttctgccattttcttaatgactttatcgcgagcttgctcatactgaaggtgtgcagcagcatccagtttatgcttttgatgcagacgactttccagcgcaatcagcaggtcgcgcagttccatgacagacataaagaacaacgattctttattgcgaggttctttaattttcagcgccagtgcaatgaaattattactcttgcgaataacaccggtattaacacccttgatgcttatggccatgtaggttctccctaaccatttctcaattaaataattaattttaatttataagccagataaatgggcttggtagtaatagttgttaaaataacataaatagccgtactcactctatataaacagaaaagaaaggttaattattggtgttagctatataaaaagtaacaacagcaatgcatatgaataattaaaggttatgcaacgggcaaagattaaacttcccagtttaatgacaggttgctgtacttgcgtttgttgctcttgccggatgcagcgtaaacgccttatccggcctacagttcattgcaaatccattcaatttcaatgcacgatgtaggcctgataagcgtagcgaatcaggcaattttaatgtttaacttccctgtttaatcagttactgctggcgtagctggagatccagcggcgttttgctgggttcgccgccaatttctcgcgccagtttcggcaccagatatcccgacaccagtgtcagcaactcacgcataatctgccgtgcttcgtcatcactcaccataaaatgcgccgcgccctgtactttatcgagcacatgcaggtaatacggcattacgccggcatcgaacaacgcattactcaggtttgccagcgtttgtgcgttatcgttcacatcacgtaacagaacgctctggttcagcaaagtaacgcctacccggcgcaacttagccatcgcctgacggaatgtttcatctacctcattggcatggttgatgtgattcaccagcaagatttgcagcgtagaacgggcaaagcattcaaccagcgcctcggtgatacgtgccgggatcacaatcggcagacggctgtgaatccgcagacgttttatatgcgggatggcttccagttgtgtgagcaaccagtccagctcgtgatctttcgccatcagcggatcgccgccggagaaaatcatctcgtccagttccggatgcgcagcaacatactcaagtgcagtttgccagttacgcttgttgccctgattttcggcataggggaagtgacgacggaagcaatagcggcaatttaccgcgcagccgcctttgaccagcaaaagcgcccggttgtggtatttatgcaacaaaccaggcactacgctgtgctgttcttccagtgggtcggtggagaatccgggcgcgatgacaaactcatcttgcgaggtaagtacctgacgcaaaagaggatcgtccggattgcctttctccatgcgatcgataaatgagcggggcacacgcagggcaaaaagctttttggcgctgcgtccggctaacagtttttcctccgcgtctatattcaaaagacgcagaagttcatcaggatcggtcacaacatcggcaagttgcgttaaccaatcttctctggatggggtatttagggttacaatatgcgccattttgtggcttagctaccaattaacaaatttcagagggccttatggcaacgtactatagcaacgattttcgtgctggtcttaaaatcatgttagacggcgaaccttacgcggttgaagcgagtgaattcgtaaaaccgggtaaaggccaggcatttgctcgcgttaaactgcgtcgtctgctgaccggtactcgcgtagaaaaaaccttcaaatctactgattccgctgaaggcgctgatgttgtcgatatgaacctgacttacctgtacaacgacggtgagttctggcacttcatgaacaacgaaactttcgagcagctgtctgctgatgcaaaagcaattggtgacaacgctaaatggctgctggatcaggcagagtgtatcgtaactctgtggaatggtcagccgatctccgttactccgccgaacttcgttgaactggaaatcgttgataccgatccgggcctgaaaggtgataccgcaggtactggtggcaaaccggctaccctgtctactggcgctgtggttaaagttccgctgtttgtacaaatcggcgaagtcatcaaagtggatacccgctctggtgaatacgtctctcgcgtgaagtaatgcggttgtggtgcggcctgcaggctgcaccatcacttattcaggtcagagatgatgaaacgccttatcgttcttgttttgcttgccagcacgctgctcacgggctgtaacaccgctcgcggtttcggcgaagacatcaaacatctcggcaactccatctctcgcgctgccagctaatttttcttctcttccgaaaaatcatcagattcccatcatttttggcgatgttgtctattattaatttgctataggcaaacataaataacattacctaaaaggaagacgttatggtgaagaagacaattgcagcgatcttttctgttctggtgctttcaacagtattaactgcctgcaacaccacgcgtggcgttggtgaagacatttctgatggcggtaacgcgatttctggcgcagcaacgaaagcgcagcaataagcaataacggtacgacagctgtgtcgtgccgtttgttttttctgcgatagtcacaaaggtaatagttgaaattcccctgccacctggcaaaatatccgttcaaccatcagctttgcaggacgacctgcaaacgcctcttttcaccggggacggccccaattctccggagcctgatatgtcctggattatcttagttattgctggtctgctggaagtggtatgggccgttggcctgaaatataattaataataacacggctttagtcgtttgacgccgagtgttattactgtgacggcgatgattgtcagtatggcgctacttgcctgggcgatgaaatcgttaccagtagggacggcttatgccgtgtggacgggtattggcgcagtcggcgcggccataaccggcattgtgctgctcggtgagtccgctaacccgatgcgcctggcgagtctggcgttaatcgtattggggattattggtctgaaactcagcactcactaactaccaggctgctgtacccaaataaatttactgacatcaaacccttcccgggtcgcgactgccagcatctcctgtttcacttcgtcagaaatggttggcgtgcgggagagtatccacaggtagtcgcggtccgggccgcaaaccagcgcatggcggtattcccgatcgagtgcaataacgttataaccgccatagaaaggaccaaagaatgacactttcagcgcagcgcgagttggtgcgccggtaaagtacgctttcccttcactctgctgccacattcctctgtcagggttatagcctttattaatgacattcaggccgccgtcatcacgcaggctgtatgttgcggtgactttttccagtccacgttcaaagcggtgatcaaaacgggcaatctcataccaggtaccgagataacgtttggcgtcgaaattatttactacggtcacgccacgcggcggcgtaggagaactgcaggcaacgaccagaaatgcagctgtcgctgcggcaacgagagggagcaggcgcataaatgtttccttactggtttttttctaagtgtagatgacagcaaggaaaagcggagaaaaggtccgaaaattcggacccgatggaattttactgtagagcgttaagaatctgccaggcggcgtcgactctcgctggattgggatagtttttgtttgccagcatcacgatacccagctctttttctggaataaacgcgacatagctaccaaatccgccggtcgcccctgttttatgtacccatgatgcgcgtactgcaggagttgggggcgtaatcgcttttacggggcgtgctgccagtgcaattttattgtcactgccgttaatgatgctgtcaggatttaccggccagtccagcatttcccagcccaggccctgatacatatcgccggtttgccagtagcgagattgtgccagttgtatcccttgttgaagcgttttctcattgatatcaaggggttttaaattgctttgcacccagcgggccatatcttcaatggtcgacttcacaccataagcttcagcatctaacgccccaggcgaaacatgcactgccttaccttcgcgatatccccaggcgtaattcttttcttctgcgggcggtacattaatccacgtatggttgagtttgagtggctggaagacacgagtttgcatcgcctgctcaaaactcaaaccagacggcttcacagccagtgcgccgaacaaaccgatactggagttggcatacagacgttgtgttcctggagcccatgcaggctgccagttttgatagaagcgcagcaagtcgcttgaggatttcacctcatccggcacctgcaatggcaggccgccagcagtgtaggttgcgagatgtaatagtgtgatcccattccactgtttagcggtaagttcaggccagtattttgttgtgggatcgcttaacttgatttcccctcgagcaatagcgtcgccaccaagcacgccagtaaatgttttgctgaccgaacctaactcaaacaacgtttgctgtgtgacgggctgctttttggcgatgtccgcatagccccaggtaaagtaataaggtttaccctgataaattaccgccaccgccatacccgggatcttttgttgctctataagcggggtaattgtgcgatgcacaatatcgttgatttgttgaggggcagcaaatgtggagcaagaggcggtaattaataaggcgcagagcgtcgttttgaacatagggtctggtttccatacaaaacggcccgccataggcgggccggatttacattggcgatgcgttagattgtaacgacaccaatcagcgtgacaactgtcaggatagcagccagaccgtagaaaacccatttgcccgcaggtacgtggattttcagatcgtgcatcgcgtggtgcatacggtgtaaaccacaccacagcggcagaacgatcatcaggaacaggaatacgcgaccaatgaagctctgcgcgaacgccagaacgcgctcgtagctcagcgcatcacccggaaacaaccccagtggcagcagaatacccaccagcaggatcatcaccggcgcaatgatggcgctccacataccaccggccccgaagaggccccagaataccggttcgtcagaacgctttggatttggattaatcatctcaggctccttaccagtacagggcaacaaacaggattacgatggtggcaaccacagttaccgcccagagacttttgataattggctctggtcccattttttcgtcttttacaatgatattggccgctttcggtgccagttcaaaccaggttttggtgtgcagcagagctgccgccagagtgatcaggttaatgatcacgataaccgggttttgtaaaaagtcgacgaatcccgcccaggcttccgggccatttttcagggcaaacagcccgaaaatcagttcaatgctgaaccacacagccggaaccgccgtgccttcgcgcagcatgtaaaagcgataaaacggcaattttttccaccaggtggacgtcattggccgtacatacggtttacgtttagtcgtcatgttgcactccttagcgtggtttcagggtcgcgataagaaagtctttcgaactttctactttgccctgctgaatggccgcagccggatcgacgtgtttcgggcagacttcggagcagtagcccacgaaagtacagctccatacgccgttctggctgttcaactgcgccatacgctccttcttaccgtggtcgcggctatcttcgttataacgatgcgccagcgtaatggcagccggaccgatgaactctgggttcaggccaaactgcgggcacgcggcgtagcacaaaccacagttgatgcaaccggagaactggtgatacttcgccatctgcgccggggtctggatgttagtaccctgatccgcggtgcgggagttgccgatgatgtacggtttgatcgcttccagactttcgatgaagtgggtcatatcgaccaccagatcgcgttcaatcgggaagttagctaacgcttcaaccttcataccgtcggtgtaatcacgcaggaaggttttacatgccagttttggcacgttgttaaccatcatgccgcaggaaccacaaatcgccatacggcaggaccagcggtagctcaggtccggtgccaggttgtctttgatgtagcccagcgcatccagtaatgaggtagttgcgtcataaggcacttcatagaatgcgctatgcggtgcggtatcgacttccgggttatagcgcaccacctcaattttcaggtttttcatctcagccattcgccttctccttcttattggctgcttccgccttatcggctgcatccgcttcgccaccgtaaacgcgtttagctggcggcagcgtagtaatcttcacgtcgctgtactccaggcgagtcgtgccatcagcatcgcggaaggcgagggtgtgtttgaggaagttgacgtcgtcacgctcggtgcaaccttcgtccagacgctggtgcgcgccgcgggactctttacgtgccattgcggagtgcgccatacattcagcaacgttcagaccgtggcccagttcaatggtgtagagcaggtcggtgttgaacacgctggaagtgtcggtgatgcgcacgcgcttgaagcgttcctgcagctctgccagcttgtcgatggttttctgcatcagttccggcgtacggtagataccgcagccttcttccatagccaggcccatttcgtcgcggatcttcgcccagttttcgccgccatcctggttaaccagatctttcagacgttgttcaacgccagctgcctgcgcttcaattgccgcttcgttgccattaccggcagttgctgcacgctctgtcgcttgttcaccggccagacggccgaagaccaccagttccgccagggagttagaacccagacggtttgcaccgtgcagaccaacagaggaacattcacccacggcgaacagacctttaatgcgggtttcacagttctgatcggtttcgataccgcccatggtgtagtgtgcggtcggacgtaccggaatcggttctttaaccggatcgacgccaacgtacgctttcgccagttcgcagatgaacggcagacgttcatgcagttttttctcgccgaggtgacgcaagtcgagataaaccacatcgccacgcggcgtggagatggtgttgcctttacgccattcgtgccagaaggcctgagagactttgtcgcgtggacccagttccatatatttgtttttcggctcgcccagcggagtttccgggcccatgccgtaatcttgcagataacggtagccatttttgttgaccagaataccgccttcaccgcggcaaccttcggtcatcaggataccggaacctggcagaccggttgggtgatactgaacgaattccatgtcacgcagcggaacgccgtggcttagcgccatacccataccgtcaccggtaacgatgccgccgttggtgttgtaacgataaacgcgacccgcaccgccagtagccataacgaccgcgttagcacggatctgcaccagcgtgccttccatcatgttcattgctaccaggccgcgaacatgaccatcatcaaccagaatatccagcacgaaatgttcgtcaaaacgctggatctgcgggaattgcagagaggtctggaacagcgtgtgcagcatatggaagccggtcttatcggcggcgaaccaggtgcgctcgattttcatgccgccgaagcgacgtacgttgacgctaccatccgggcgacggctccatgggcatccccacagttccagttgggtcatttcggttgggcagtggtggacgaaataatccacgacatcctgctcacacaaccagtcgccacccgctactgtatcgtgaaagtgatattcgaagctgtcatgatcctgcgcgacagcggcggagcccccttctgcagcaacggtatggctacgcatcgggtatacttttgagattagtgcgatttttgcattcggatttgcctgcgcggcagcaattgcagcacgtaatcccgcgccaccggcgcctacaatggcaagatcggcttgaaaggtttgcacgacattcctccagattgtttttatcccacagccacgtacttcagggtaagtacctgaaagttacggtctgcgaacgctattccactgctcctttataggtacaacagtatagtctgatggataagtctgaaatttgacgagatcgatttttttagtgcgcaagagggctaaattatcactgaagatgattaatttaattactaaaccatcagatcgtgctttttttagtcactgcccaccgctgtttgattcctgcgtaaaatttgtctcgccgtcgcgttgcgagtagacttcgtgcccttgtcaaaaactggagatttaactatgagcgaaacggcatcctggcagccgagcgcatccattcctaacttattaaaacgcgcggcgattatggcggagatccgtcgtttctttgccgatcgtggagtgctggaggtggagacgccttgtatgagccaggcgacggtaaccgatattcatttggtcccgtttgagacacgtttcgttggccccgggcattcgcaggggatgaatctctggttaatgaccagcccggaataccatatgaaacgcctgctggttgccggttgtgggccggtattccagctgtgccgcagcttccgtaatgaagagatggggcgttatcacaaccctgagttcactatgctggagtggtatcgaccgcactatgatatgtaccggttgatgaacgaggtggacgatctcttacaacaggtgctggactgcccggcagcagaaagcctttcttatcaacaagctttcttgcgttatctggaaattgacccgctctctgccgacaaaacgcaactgcgggaagtcgcagcgaaactggatttgagcaatgttgctgataccgaagaagaccgcgacacgctgctacaattgctgtttacctttggcgtagagccaaatattggcaaagaaaaaccgacctttgtgtaccactttccagccagccaggcatcactggcgcaaatcagtaccgaagatcatcgggtcgctgaacgctttgaggtttattataaaggtattgagctggcgaatggtttccatgaattgacggatgcccgtgagcagcaacaacgctttgaacaagataaccgtaagcgcgcggcgcgcggtttgccgcagcaccccattgaccagaatctgattgaagccttgaaagtcggtatgcctgactgttccggcgtggcattaggtgttgatcgtctggtgatgttggcgctgggcgcggagacactggctgaagtcatcgcctttagcgttgaccgggcataattctgaaaaattactgaattaacagcgaagaatggcgtgataagcgccattctgtagcatatgttttcatttttccgttaaaggccacaatttaagactggatatttgatatcatccaggtatcaattctgtattggtttttacgctgcctgctcaatgttgcgcagtgcagttcagtgggcacgtgttatacacgcgctgaaatgaaggatggtttcatgcctcacacgataaaaaagatgagtctgataggactcatattgatgatctttacttccgtatttggatttgccaatagcccatcggcttattacttaatgggttatagtgcgattcccttttatatattttctgcattgttattctttattccattcgccttaatgatggctgaaatgggagctgcttatcgcaaagaagaaggcggtatctattcctggatgaataatagtgtcggaccacgttttgccttcattggtacgtttatgtggttttcctcttatatcatctggatggtgagtacctccgcgaaagtttgggtaccgttctcaacattcctctatggtagcgacatgacccagcactggcgtattgccggactggagcctacgcaggtggttggtctgctggctgtggcatggatgattctggtcaccgtcgttgcttctaaggggattaataaaattgcccgcattactgcggtgggcggtattgcagtaatgtgtctgaatttagtattgctgttagtaagcattactattttgttattaaatggtgggcatttcgcgcaggatattaatttccttgcatcaccgaacccgggttatcagtccggtctggcaatgctatcgtttgtggtatttgccatttttgcctatggcggaattgaagcggttggtggtctggtcgataaaacggaaaatccagaaaagaactttgccaaaggtattgtttttgccgctattgttatttcaatcggttattcgctggcaatatttttatggggcgtcagcacaaactggcagcaggtattaagtaatggttccgttaacctcggcaatattacctatgtgctgatgaagagccttgggatgacgctgggtaatgcactgcatttgtcacctgaagcgtcattgtcgctgggcgtatggtttgcgcgtattactggactttcgatgttcctcgcctataccggtgcgttctttacgctttgctattcaccgttgaaagccatcatccaggggacgccgaaagcattgtggccggaaccgatgacgcgcctgaatgcgatggggatgccgtctatcgccatgtggatgcagtgcgggttggttactgtcttcatcctgctggtttcgtttggtggcggtaccgcatcggcgttctttaacaagctgacgctgatggcgaacgtgtctatgacgcttccttacctgttcctcgcgctggctttcccgttctttaaagcacgtcaggatctcgacagaccgtttgtgattttcaaaacgcatttgtcggcaatgattgcgacagtggttgtcgtactggtggtgacatttgcgaacgtcttcaccatcattcaacctgtggttgaagccggagactgggacagcacattgtggatgattggcggccctgtcttcttctcgctgttagcgatggcgatttaccagaactattgcagcagagtggcaaaaaatccgcagtgggcggtggaataacccgatgccctatcgtctacctgacgatagggcgtaaagacaggaaatgttatggatgacaccagccgggacccggcaataaccgaagatgaaatcagggcgctgcaattttctgccggggatgtagcggaaatagagcagacgattctctcttttgtcgatgcctgccacacccgtaaagtggcgatggtggtgggtagcaccattaacaccctcaaagatcgcgatggtaaacggtggggaaacctgccggatatttattgcgcttatcttatccgatgtctggtttttcgcggggaattagtgggatacggcgatttgtttcgtatgcgctatagcgaaattaagcgaccggttaccttatgagtgcgcgcatgtttgtcttatgctgcatctggtttattgtggcgttcctctggataaccatcacttccgcgctggacaaagagtggatgattgatggacgcgggattaacaacgtctgcgatgtgttgatgtatctcgaagaagacgatacccgtgatgttggtgtgataatgacgttaccgctctttttcccttttctctggttcgctttgtggcgaaaaaaacgcggctggtttatgtacgccaccgcgctggctattttcggctactggctgtggcagttttttctgcgctatcagttttgtttgtgagccggattggttcatccggcacacaaacttacaaacttcccgcctgacgacctttgcccgcagacgtcagcgttctccccgtttgtttaccgttgaggctttccagacgcatctggaagggcgggaatggcatatcgataccgtgggcatggaagccagccagaatcagctggtggatctcatggcgtagcggcatacggtgacccatctcagcggcgtaaatacgcagctcgaaaatctgaatcccctgttgcagatccaccaggaagacttccggtgccgggttgtcgatcaccagcgagcagcgacgcgctgcggtgagcaggatttccgtcacttcttcgctattggcatcggcaggggccggtatcgtcaacaccacgcgcgtgaccgagtcagagagcgaccagttgataaactgctcggtaataaacgccttgttcggcacgattatctctttacggtcccagtcgctgatggtggtggcgcgggtgttaattttcgtcacgctaccggtgagatcgcgaattgtcaccgtatcgccaatgcgaatcggtttttcgaacaggataatcagaccagagataaagttggcgaaaatttcctgcaaaccaaaaccgagaccaacaccgagcgcggcaaccagccactgcaatttcgaccactcaataccaatcattgagaagccgaccagcccgccaatcagcatcagcagatatttggtgatggtggtgatggcgtaacccgtacccggcgttaaatccaggtgctgcaaaatcgccagttccagcagcgcgggcaagttgcgcaccagctgcgtggtgatgataaacaccagaatggcaatcagcaccgcaccgagggtaattggctccagactttctacgccctgtaccgtggaggtgacatcccacagcgaaatattttcgaggaagccgaaagcggaatggatttctgaccacagcacaatgacagaaagcagggcgatcaacatcaaaattgagcgcaccagccgcaaggattgcgcactgatggcatcgagatcgacttcgctttcatcgacttcaattgctccttccgggctactgtgatgatgcgcttcctcttcgccacgcgcacgttgcgctaacatctctgcccggcgatgcttcgcccgatcaaacgccagcctgcggcgctggatcagcatccagcggcggataacgtgataaaccaccagtagcaggaaccagatggcaaccgaggtttcaagcctcgctaacagcgcctgtgccgttgccagataacccaccgccgacgccagaatggcaaccaacggcgcgccaatcatcatgttccacagcatatggttggtaatgttgtcgccgctgccctctttgttgagatacagcggaatcccggcctttttcaggctgagggtgaccaccgccagcgcaccgcaaatgaggataaagcaaagccgtcccagcgaaccggagaattcacggtcgtcgaggttatcgaacatcatcagcgccataatcagcggcacaataagcccgatgctcatcaggtagtagcgcatcccacgggaaacacgttcgcgcggccagccaaaatgagcgataaacaagccgttcgggcgggcaaaggtggcgcaaatcatcactacccacagcagcggcacggtggccgttacaccatcgccaatcgcgaccgccagcggataaggccacgcctcgcgcaagccgtaacccagcgtcatccacagcaccggtaacggtgacgcgacgagaatcgaccagaaaagagtgcgcaacgtcagccagaagtgatcctgagtcactttgccaactttcgccgccgaacgttcaagaaaacgggtgaaatagcggcgcgagtaaatactgcaaccgaccagaatcaacgcgccaaacagcggcaaaattgtctctttgctggtcagcatcatcacactggctttgcccaactgactgaaggtgtccagcgaaatgagacgacgcagatcctgggcgatttccagcggccaggcgatggtcatcgggcgcacgtcagaggtccagaacagatagcggtgcgttgcttcgttcacctctttcagcgcatcctccagttgcccgttggagactttcagcttggtcagttccaatagtagcgtgtcgccaccctgcaacaatgagttcagcaactcacgctgagtgcgcagttgtgcttccagaatacggttttgctcggcagtcagcggctgaccgtcggcctgatgaatttgccgtagcagcggctgtttattaagcagatcctcataacgtaaccgttgcacacgcaactgcgccatttcggtatcaagctgttgtggtttcggcatttccggcagccgtgccacctgcgcccgcagcgcttcgccgagcagattggacgatcccagccattgcgactgttcacgcagcgtattcaacgcctgccggacctgtaacgtctggctggcagcctgacgctgttgcgaggcaacgagatccatccgctgcgcctgttgattcaaagccgccgatagttcgcggttaattttgaattgcgcgacgatatctttcggcaaatcggcgctgttttctgccagcaattcggtactttccagcgcccgctccgcctcaagctgacgttggctgtttaattgattacgcaaggcctgcaaatacgcatccagttgctggctctctttttccgccagctctgagcgtaagcgcgctaattcctggcggttattggcagacagctgcgccagctccagttcatcaacgagcgccttaagacgtgcagagtcagactgcaacgcgaaattttgtgcctgattgagcggagtattgccggtaagcgttcccaggcggcgctcgatctcatttaactgacggcgggcgtcggtttgctgttgcggcagttgattcagcgaatcggcaatctcgcgggcgcgctcctgctcttgctgggcctgacggcttttatccagcaactggctgctgacctggagaatttcctgattcagcgcgtcggtagacattcccggcgacacgctgcgcggctcgtcacgcatgttgtttaattgtgcgcgcagagtagcggagagtttcggataattatcgataacttgctgatattgtttgatgcgctcaagggaaccttttcgttcctcaagcgcatttaaggcagactggagcgcctctacgacttccggctgtgcgggtttcgccgcttttgcctgctccagttcctgagtgatttgtttgctatcgggggccgtcgcggcgtacgccccccaactgaggcaccaggccatcagaaaagtgataatcaggcgcacgtcagcgtttcctttgatggattagacctggtcttttttgtcgtcaaccaatgggctggcgtcgtgttctgcttcgatctcttcagcaggaagcggggcaggttcagcgtctggcgtaacaaaggtttcggtagatactgccagcggctggccaattttcgtgacagacaggctttccagttgctcaaccagattcactttacccggtgcaaacaggttgataacggtggaaccgagtttaaagcgacccatttcctggcctttcagcagtgccacagaaccgtcgttttccccggcaggccaggtccagcgcttgatgataccttcgcgcggcggcgtaatggtgcccgcccagaccgtctcaatgctgccaacaatcgtcgctccgaccagaatctgcgccattgggccaaattcggtatcgaaaaggcaaatcacgcgttcgttacgggcaaacagattcggcacgttctgagccgtgagatggttaacggagaagagatcgcccggcacgtagatcatctcacgcagaataccgttgcacggcatgtgtacgcggtggtagtcacgcggggagaggtaagtggtcacaaacgtaccgttgcggaacaggtccgccatcagatagttgcctgccagcagggcttcgaggctgtagttgtggcctttggcttgcaggattttatcttcttcgattttacccaactggctgataacgccatcggcaggcatgaccagtacattcggatcggtatcgattgggcgtacttcgtcacgcagcggacggacaaagaattcgttaaaggtgcggtagctggcggtgtccggcttttgcgcctctttcatgtcgaccttgtagtatttaacgaacagatcgataaccagttttgtcagccatcctgcccgcttgcttgcgccccaacccgccaggcgagtaagccatagtttcggcagaatgtactgtagcgaaagtttaaatgaatttaacaaggtagcctccaggccattgttttgtcgttcctgatccggcctacatgccggatcctgaaaaaaaggggacgattctaacgacggttagcttaattgtcagtcatccgtatcagaaaagtttttacgcgtttttacctgcgccatgctttccagaatacggtgatagttttcgaaacgggtttccgcgattttcccttcctcaaccgcttcccggatagcgcagcccggatcggtatcgtgtttgcaatcgcgatatttacacagacctaaatagtcatggaattcgacaaagccctgagtgatttgttccggctccaggtgccagaggccgaactcacgcactcctggggagtcaatcacatcaccgccgtgcgggaagtgatacagccgagcggcggtcgtggtgtgctgaccgagccccgagttgtcagagatatcgttggtcaggatctctttttgcagccccagcaacgcattcagcaggctggatttgccgacgccagactgcccggcaaaaatgctgatgcgcccggtcaacgcctcttccagcggttttagcccatcctgagtatggctggaaaccatcaatacgcgataaccgatattgcggtagatatccatctgctcgttgacgaacgccatgccttcgtcgtccagcaggtctatcttgttgagcacaataatcggctcaatctgcaaggtttcgcaggccaccaggtaacggtcgataatattgagcgacagctccggcaaaatggcggagacaatgacaatctggtcgatgttggcggcaataggttttacgccgtcgtagaaatccggacgcgtcaacaccgaggtacgctcatgcaccgcttccacgatccctttgacatttacgccttccgccgccggtttacccggacgccagactacgcggtcgccggttaccagcgaacggatggtacggcgaatattgcagcggtgaacgtcgccatcggcggattccacatcagcgtgcataccaaagcggctgatgacgataccttcatcaggctcgccaaacagattgtcgtcgtagtcgggcttctccttagacgttttaagacgacgctggtgattggcgttcacgcggcgctgctggcctttggagagtttatttttactcaatcgtacagactcctggtcgcccctgatgggcaaaacatctatgatacacgcaattgtggatcaatatagtcactgtgaatgggtggaaaatagcatgagtgccaatgaaaacaacctgatttggatcgatcttgagatgaccggtctggatcccgagcgcgatcgcattattgagattgccacgctggtgaccgatgccaacctgaatattctggcagaagggccgaccattgcagtacaccagtctgatgaacagctggcgctgatggatgactggaacgtgcgcacccataccgccagcgggctggtagagcgcgtgaaagcgagcacgatgggcgatcgggaagctgaactggcaacgctcgaatttttaaaacagtgggtgcctgcgggaaaatcgccgatttgcggtaacagcatcggtcaggaccgtcgtttcctgtttaaatacatgccggagctggaagcctacttccactaccgttatctcgatgtcagcaccctgaaagagctggcgcgccgctggaagccggaaattctggatggttttaccaagcaggggacgcatcaggcgatggatgatatccgtgaatcggtggcggagctggcttactaccgcgagcattttatcaagctgtaaaatttttcctggtcacgtaagcgccggaatccacttgcggcggcgtgattttgacgctaaattgaacgtcttgctgataatttcagcacttgagataaaaacgcaaaaaaaacttttttggggggttgcagagggaaagatttctcgtataatgcgcctcccgtaacgacgcagaaatgcgaaaattacgaaagcaaaattaagtagtacgcgggaatagctcagttggtagagcacgaccttgccaaggtcggggtcgcgagttcgagtctcgtttcccgctccaaaatttgaaaagtgctgcaaagcacagaccacccaagcgggaatagctcagttggtagagcacgaccttgccaaggtcggggtcgcgagttcgagtctcgtttcccgctccaaaatttgaaagtgctgtaaggcacagaccacccaagcgggaatagctcagttggtagagcacgaccttgccaaggtcggggtcgcgagttcgagtctcgtttcccgctccaaattcttctctcaataaaatatccacagcgacgcgatgcgttattgctggtttttgttgtctctgacaaactcttgtaaacagagttatccacagcctcaggctgtaatcttaatttcaaagaaacttcgcacggtgaatagtatttttttaacctattgatagataagttaaaaattaagattccgttttgtcgagtcgatcacttgacgattttattcgtcttgaattgcaatgcgtttttatttttattcacaagctgtggatgaatcaggcgtcacgcggtaaccctttttcaatcacccgaaccagacgctgttttttcggcaattgcacttcgactatgcacgcatttcgtctctctatttgctgcgcaatcgcccacgctatgtgctcatcgagaagtgggtgctcacctttacgactttccagcgctgtcaaaatcgtttcatcccaaggggcattgcctaatgctacggcgatattacgcagccaacgcaggtgaccaatacgacgaatcgccgatccttccgtgacttttaaaaacttctcttcgctccaggcgaataactcaatgagttccggtgcgtgtagcggcttacgcgggctgaaatcctcttctgtggtgagttgtgaatagcgattccacgggcagataagctggcagtcatcgcaaccgtaaatacggtttcccattaacggtcgcaactcttccgggatcgccccttcaagttcgatggtgagataagagatacagcggcgagcatcgacggtatatggctcgacgatggcaccggtcgggcaaatcgtcatacaggccacgcatttgccgcatccttcctcgactggttgatccacgggcagcggaatatcgaccagcaattcgcctaaaaagaagaacgaaccggcctcgcgattgaggataagtgagtgcttacctgtccagccgagcccagctttttcagctaacgggcgctcgagaataggcgcagaatcgacaaacggtctaaaattcagcgaaacacaatgttgctgaatcatctcgcccagctttttgagtcggttgcgcagaagtttgtgatagtcacggcccagcgcataacggctaacatagccgagtttggggtttttcagcgtgctggcaaatgcggcgttagcaggaaggtaattcatccgcacgctgatcacgcgcagcgtaccgggcaataactcatgagggcgagcgcgcagcataccgtgacgtgccatccagtccatttcgccgtggtattgtttgtccagccatgcttgcagtttgggctcggactcgctgagatcggtatcggtaatacctacctgctgaaagcccagttccagcccccactgtttaattttttgcgctaactgattgagatcgaggggctctgacatgacggaccatacaatgaagaaaaaccccgtaagtataccacacaccgtctggtacgccgacgatatccgccgcggagaacgcgaggcggcagatgtgctggggctcacactctatgagctgatgcttcgcgctggcgaggccgcattccaggtgtgtcgttcggcgtatcctgacgcccgccactggctggtgctgtgcggtcatggtaataacggcggcgatggctacgtggtcgcgcgactggccaaagcggtcggcattgaggtcacgttgttggcccaggagagcgacaaaccgttgccggaagaggccgcgctggcacgcgaagcatggttaaacgcgggtggcgagatccatgcttcgaatattgtctggcccgaatcggtagatctgattgttgatgcgctgctcggtaccggtttgcggcaagcgccccgcgaatccattagccagttaatcgaccacgctaattcccatcctgcgccgattgtggcggttgatatcccttccggcctgctggctgaaactggcgctacgccaggcgcggtgatcaacgccgatcacaccatcacttttattgcgctgaaaccaggcttgctcactggaaaagcgcgggatgttaccggacaactgcattttgactcactggggctggatagttggctggcaggtcaggagacgaaaattcagcggttttcagcagaacaactttctcactggctaaaaccgcgtcgcccgacttcgcataaaggcgatcacgggcggctggtaattatcggtggcgatcacggcacggcgggggctattcgtatgacgggggaagcggcgctgcgtgctggtgctggtttagtccgagtactgacccgcagtgaaaacattgcgccgctgctgactgcacgaccggaattgatggtgcatgaactgacgatggactctcttaccgaaagcctggaatgggccgatgtggtggtgattggtcccggtctgggccagcaagagtgggggaaaaaagcactgcaaaaagttgagaattttcgcaaaccgatgttgtgggatgccgatgcattgaacctgctggcaatcaatcccgataagcgtcacaatcgcgtgatcacgccgcatcctggcgaggccgcacggttgttaggctgttccgtcgctgaaattgaaagtgaccgcttacattgcgccaaacgtctggtacaacgttatggcggcgtagcggtgctgaaaggtgccggaaccgtggtcgccgcccatcctgacgctttaggcattattgatgccggaaatgcaggcatggcgagcggcggcatgggcgatgtgctctctggtattattggcgcattgcttgggcaaaaactgtcgccgtatgatgcagcctgtgcaggctgtgtcgcgcacggtgcggcagctgacgtactggcggcgcgttttggaacgcgcgggatgctggcaaccgatctcttttccacgctacagcgtattgttaacccggaagtgactgataaaaaccatgatgaatcgagtaattccgctccctgatgagcaggcaacattagacctgggcgagcgggtagcgaaagcctgcgatggcgcaaccgtaatctatctgtatggcgatttaggcgcaggtaaaaccacctttagccggggctttttacaggctctgggtcatcagggtaatgtcaaaagccccacttatacgctggtcgaaccctatacgctcgacaacttaatggtctatcactttgatttgtaccgccttgccgatcccgaggagctggagtttatggggatccgcgattattttgccaacgatgccatctgcctggtggagtggccacaacaaggtacaggtgttcttcctgacccggatgtcgaaatacacattgattatcaggcacaaggccgtgaggcgcgcgtgagtgcggtttcctctgcgggtgaattgttgctggcgcgtttagccggttaacctttgaaaggtggcgggatgatgtatcgcatcagaaattggttggtagcgacgctgctgctgctgtgcacgccggtgggtgccgcgacgctctctgatattcaggtttctaacggtaatcaacaggcgcggataacgttgagttttattggcgatcctgattatgcgtttagccatcaaagcaaacgcaccgtggcgctcgatatcaaacaaacgggcgtgattcagggactgccgttgttgttcagcggcaataatctggtgaaggcgattcgctctggaacgcctaaagatgcacaaacgctacggctggtggtcgatcttaccgaaaacggtaaaaccgaagcggtgaagcggcagaatggcagcaattacactgtcgtctttacgattaacgccgatgtgccgccaccgcctcctccgccgcccgtggttgcgaaacgcgttgaaacgcctgcggttgtcgcaccgcgcgtcagcgaaccggcgcgcaatccgtttaaaacggaaagtaaccgcactacgggtgttatcagcagtaatacggtaacgcgtccggcagcgcgcgcgacggctaacactggcgataaaattatcatcgctattgatgccggacacggcggtcaggaccctggcgctatcggccccggtggtacgcgggagaaaaatgtcaccatcgccatcgcgcgtaaattgcgtactttgctcaatgacgatccgatgtttaaaggcgttttaacccgtgacggggattactttatctcggtgatggggcgcagtgatgtggcacgtaagcaaaacgccaatttcctcgtgtcgattcacgctgatgccgcaccgaaccgcagtgcgactggcgcttccgtatgggtgctctctaaccgtcgcgccaacagtgaaatggccagctggctggagcagcacgagaaacagtcggagctgctgggtggggcgggtgatgtgctggcgaacagtcagtctgacccctatttaagccaggcggtgctggatttacagttcggtcattcccagcgggtagggtatgatgtagcgaccagtatgatcagtcagttgcaacgcattggcgaaatacataaacgtcgaccagaacacgccagccttggcgttctgcgctcgccggatatcccatcagtactggtcgaaaccggttttatcagcaacaacagcgaagaacgtttgctggcgagcgacgattaccaacaacagctggcagaagccatttacaaaggcctgcgcaattacttccttgcgcatccgatgcaatctgcgccgcagggtgcaacggcacaaactgccagtacggtgacgacgccagatcgcacgctgccaaactaaggacgattgatgccaattcaggtcttaccgccacaactggcgaaccagattgccgcaggtgaggtggtcgagcgacctgcgtcggtagtcaaagaactagtggaaaacagcctcgatgcaggtgcgacgcgtatcgatattgatatcgaacgcggtggggcgaaacttatccgcattcgtgataacggctgcggtatcaaaaaagatgagctggcgctggcgctggctcgtcatgccaccagtaaaatcgcctctctggacgatctcgaagccattatcagcctgggctttcgcggtgaggcgctggcgagtatcagttcggtttcccgcctgacgctcacttcacgcaccgcagaacagcaggaagcctggcaggcctatgccgaagggcgcgatatgaacgtgacggtaaaaccggcggcgcatcctgtggggacgacgctggaggtgctggatctgttctacaacaccccggcgcggcgcaaattcctgcgcaccgagaaaaccgaatttaaccacattgatgagatcatccgccgcattgcgctggcgcgtttcgacgtcacgatcaacctgtcgcataacggtaaaattgtgcgtcagtaccgcgcagtgccggaaggcgggcaaaaagaacggcgcttaggcgcgatttgcggcaccgcttttcttgaacaagcgctggcgattgaatggcaacacggcgatctcacgctacgcggctgggtggccgatccaaatcacaccacgcccgcactggcagaaattcagtattgctacgtgaacggtcgcatgatgcgcgatcgcctgatcaatcacgcgatccgccaggcctgcgaagacaaactgggggccgatcagcaaccggcatttgtgttgtatctggagatcgacccacatcaggtggacgtcaacgtgcaccccgccaaacacgaagtgcgtttccatcagtcgcgtctggtgcatgattttatctatcagggcgtgctgagcgtgctacaacagcaactggaaacgccgctaccgctggacgatgaaccccaacctgcaccgcgttccattccggaaaaccgcgtggcggcggggcgcaatcactttgcagaaccggcagctcgtgagccggtagctccgcgctacactcctgcgccagcatcaggcagtcgtccggctgccccctggccgaatgcgcagccaggctaccagaaacagcaaggtgaagtgtatcgccagcttttgcaaacgcccgcgccgatgcaaaaattaaaagcgccggaaccgcaggaacctgcacttgcggcgaacagtcagagttttggtcgggtactgactatcgtccattccgactgtgcgttgctggagcgcgacggcaacatttcacttttatccttgccagtggcagaacgttggctgcgtcaggcacaattgacgccgggtgaagcgcccgtttgcgcccagccgctgctgattccgttgcggctaaaagtttctgccgaagaaaaatcggcattagaaaaagcgcagtctgccctggcggaattgggtattgatttccagtcagatgcacagcatgtgaccatcagggcagtgcctttacccttacgccaacaaaatttacaaatcttgattcctgaactgataggctacctggcgaagcagtccgtattcgaacctggcaatattgcgcagtggattgcacgaaatctgatgagcgaacatgcgcagtggtcaatggcacaggccataaccctgctggcggacgtggaacggttatgtccgcaacttgtgaaaacgccgccgggtggtctgttacaatctgttgatttacatccggcgataaaagccctgaaagatgagtgatatcagtaaggcgagcctgcctaaggcgatttttttgatggggccgacggcctccggtaaaacggcgttagccattgagctgcgtaaaattttaccagtagagttgataagcgttgattctgcccttatttacaaagggatggatatcgggacggcgaagccgaacgctgaagagttactcgccgcgccgcaccgattgctggatattcgcgatccgtcgcaggcttactcggctgctgattttcgccgcgatgcgctggcggaaatggccgatatcaccgcggcggggcggatcccactgttagtgggcggtacgatgttgtatttcaaggcattgctggaagggttgtcgccgctaccgtcggcagacccggaagtacgggccagaattgagcaacaggcggcagagcaaggttgggagtcattgcatcgtcaacttcaggaggtagatccggttgcggcagcaaggattcatccaaatgatccacaaaggctttcccgggcactggaagtttttttcatttcgggtaaaactttaacggaactgacgcaaacgtcaggagacgctctaccgtatcaggtgcatcagttcgccatcgccccggcgagccgtgaactgctccatcaacgcattgagcagcgttttcatcagatgttggcttcaggttttgaagcagaagtccgggcgctttttgcccgaggagatttgcatacggacttgccttccattcgttgcgtgggttatcgccagatgtggtcttaccttgaaggcgaaatctcatacgatgaaatggtttatcgaggtgtttgcgccacgagacagttggcgaagcggcagataacctggctgcgtggttgggaaggggttcactggcttgacagtgaaaaaccagaacaggcgcgtgacgaagtattacaggttgttggtgctatcgcaggctgaatgtgtacaattgagacgtatcgtgcgcaattttttcagaatcgaaaggttcaaagtacaaataagcatataaggaaaagagagaatggctaaggggcaatctttacaagatccgttcctgaacgcactgcgtcgggaacgtgttccagtttctatttatttggtgaatggtattaagctgcaagggcaaatcgagtcttttgatcagttcgtgatcctgttgaaaaacacggtcagccagatggtttacaagcacgcgatttctactgttgtcccgtctcgcccggtttctcatcacagtaacaacgccggtggcggtaccagcagtaactaccatcatggtagcagcgcgcagaatacttccgcgcaacaggacagcgaagaaaccgaataaggtttcgggctgtttttttacacggggagccagcgatcctgcgttccccgctgatctatttagagggttatacgcttgtttgaccgttatgatgctggtgagcaggcggtactggtacacatctattttacgcaagacaaagatatggaagacctccaggagtttgaatctctggtctcttccgccggtgtcgaagcattgcaggtgattaccggtagccgtaaagcgccgcacccaaagtattttgtaggtgaaggtaaagcagttgaaattgcggaagctgtcaaagcgacgggtgcttcggtcgttctttttgaccatgccctgagcccggcgcaagagcgtaacctggagcgtttgtgcgagtgtcgtgttatcgaccgcaccggccttattttagatattttcgcccaacgtgcgcgtacccatgagggtaagttgcaggttgagctggcgcagctgcgccatctggctacgcgcctggtgcgtggctggacccaccttgaaagacagaaaggcgggataggtttgcgtggtccgggtgaaacccagctcgaaaccgaccgtcgtttgttgcgtaatcgcatcgtgcagatacagtcgcgcctggaaagagttgaaaagcagcgtgagcaggggcggcaatcgcgtatcaaagccgacgttcctactgtttcgctggtgggatataccaacgccggtaaatctacccttttcaatcgcatcaccgaagcgcgggtctacgcggcagaccagttgtttgccaccctcgacccgacgttgcggcgtattgacgttgcagatgtcggtgaaaccgtacttgcagataccgtagggtttattcgccacctgccgcacgatctggtggcggcatttaaagccacgttacaagagacgcggcaagccacattactgctgcacgtcattgatgcggcggatgtgcgtgtacaagaaaacatcgaagcggtgaatacggttcttgaagagatcgacgctcacgagatcccaaccctgctggtgatgaacaagatcgatatgctggaagatttcgaaccgcgtattgatcgggacgaagagaacaaaccgaaccgtgtctggctttccgcacagaccggagcggggataccacagctttttcaggctttgacggagcggctttccggcgaggtggcgcagcatacattgcgtctgccaccgcaggaagggcgtctgagaagtcgtttttatcagcttcaggcaatagaaaaagagtggatggaggaggacggcagcgtaagtctgcaagttcgtatgccgatcgttgactggcgtcgcctctgtaaacaagaaccggcgttgatcgattacctgatctaacggcgtagcgtctgaagcgtggagtcatatcctctggcgtcgaaagacaacagggatcaccgcataacaaatatggagcacaaacatggcgtggaatcagcccggtaataacggacaagaccgcgacccgtggggaagcagcaaacctggcggcaactctgagggaaatggaaacaaaggcggtcgcgatcaagggccacctgatttagatgatatcttccgcaaactgagcaaaaagctcggtggtctgggcggcggtaaaggcaccggatctggcggtggcagttcatcgcaaggcccgcgcccgcagcttggcggtcgtgtcgttaccatcgcagcggcagcgattgtcattatctgggcggccagtggtttctataccattaaagaagccgaacgcggcgtggtaacacgctttggtaaattcagccatctggttgagccgggtctgaactggaaaccgacgtttatcgacgaagtcaaaccggtgaacgtggaagccgtgcgtgaactggccgcttctggtgtgatgctgacgtcggacgagaacgtagtgcgcgttgagatgaacgtgcagtaccgcgtcaccaatccggaaaaatatctgtatagcgtgaccagcccggatgacagcctgcgtcaggctaccgacagcgccctgcgtggagttatcggtaaatacaccatggaccgcattctgacggaaggtcgtaccgtgattcgtagcgatactcagcgcgaactggaagagacgattcgtccgtatgacatgggtatcacgctgctggacgtcaacttccaggctgctcgtccgccggaagaagtaaaagcggcgtttgacgatgcgattgccgcgcgtgaaaacgaacagcaatacattcgtgaagcagaagcgtataccaacgaagttcagccgcgtgcgaacggtcaggcgcaacgtatcctcgaagaggcgcgtgcgtacaaggcccagaccatcctggaagctcagggtgaagtggcgcgctttgctaaacttctgccggaatataaagccgcgccggaaattactcgcgagcgtctgtatatcgagacgatggaaaaagtgttgggtaacacccgcaaagtgctggttaacgataaaggtggcaacctgatggttctgccgttagaccagatgctgaaaggtggtaacgcccctgcggcgaagagcgataacggtgccagcaatctgctgcgtctgccgccagcctcttcctccacaaccagtggagcaagcaacacgtcgtccaccagtcagggcgatattatggaccaacgccgcgccaacgcgcagcgtaacgactaccagcgtcagggggaataacgatgcgtaagtcagttatcgcgattatcatcatcgtgctggtagtgctttacatgtctgtctttgtcgtcaaagaaggtgagcgcggtattacgctgcgttttggtaaggtactgcgtgacgatgacaacaaacctctggtttatgagccgggtctgcatttcaagataccgttcattgaaacggtgaaaatgctcgacgcacgtattcagaccatggacaaccaggccgaccgctttgtgaccaaagagaagaaagacctgatcgtcgactcttacatcaaatggcgcatcagcgatttcagccgttactacctggcaacgggtggtggcgacatttcgcaagcggaagtgctgttgaaacgtaagttctctgaccgtctgcgttctgaaattggtcgcctggacgtgaaagatatcgtcaccgattcccgtggtcgtctgaccctcgaagtacgtgacgcgctgaactccggttctgcgggtacagaagatgaagttactaccccggcggcagataacgccattgccgaagcggcagagcgcgtaacggctgagacgaagggcaaagttccggtcatcaacccgaacagtatggcggcgctgggtattgaagttgtcgatgtgcgtatcaagcagatcaacctgccgaccgaagtgtctgaagcgatctacaaccgtatgcgcgccgagcgtgaagcggtagcgcgtcgtcaccgttcacaaggtcaggaagaagcggaaaaactgcgcgcgactgccgactatgaagtgaccagaacgctggcagaagctgagcgtcagggccgcatcatgcgtggtgaaggcgatgccgaagcagccaaactgtttgctgatgcattcagtaaagatccggacttctacgcattcatccgtagcctgcgtgcttatgagaacagcttctctggcaatcaggacgtgatggtcatgagcccggatagcgatttcttccgctacatgaagacgccgacttccgcaacgcgttaatataacgactgcggtacaggtcaataaagccaccgcatcctcagggatgtcggtggttttctttttctataaggataatgaatgaattcgacaatctggctggcgcttgccctggttttggtactggaaggtttagggccgatgctttacccgaaggcatggaagaagatgatctctgcgatgaccaatttgcccgataatattttacgtcgttttggcggtggacttgtggttgcgggcgttgtggtctactacatgttgaggaaaacgattggctgaacaaaaaacagactgatcgaggtcatttttgagtgcaaaaagtgctgtaactctgaaaaagcgatggtagaatccatttttaagcaaacggtgattttgaaaaatgggtaacaacgtcgtcgtactgggcacccaatggggtgacgaaggtaaaggtaagatcgtcgatcttctgactgaacgggctaaatatgttgtacgctaccagggcggtcacaacgcaggccatactctcgtaatcaacggtgaaaaaaccgttctccatcttattccatcaggtattctccgcgagaatgtaaccagcatcatcggtaacggtgttgtgctgtctccggccgcgctgatgaaagagatgaaagaactggaagaccgtggcatccccgttcgtgagcgtctgctgctgtctgaagcatgtccgctgatccttgattatcacgttgcgctggataacgcgcgtgagaaagcgcgtggcgcgaaagcgatcggcaccaccggtcgtggtatcgggcctgcttatgaagataaagtagcacgtcgcggtctgcgtgttggcgaccttttcgacaaagaaaccttcgctgaaaaactgaaagaagtgatggaatatcacaacttccagttggttaactactacaaagctgaagcggttgattaccagaaagttctggatgatacgatggctgttgccgacatcctgacttctatggtggttgacgtttctgacctgctcgaccaggcgcgtcagcgtggcgatttcgtcatgtttgaaggtgcgcagggtacgctgctggatatcgaccacggtacttatccgtacgtaacttcttccaacaccactgctggtggcgtggcgaccggttccggcctgggcccgcgttatgttgattacgttctgggtatcctcaaagcttactccactcgtgtaggtgcaggtccgttcccgaccgaactgtttgatgaaactggcgagttcctctgcaagcagggtaacgaattcggcgcaactacggggcgtcgtcgtcgtaccggctggctggacaccgttgccgttcgtcgtgcggtacagctgaactccctgtctggcttctgcctgactaaactggacgttctggatggcctgaaagaggttaaactctgcgtggcttaccgtatgccggatggtcgcgaagtgactaccactccgctggcagctgacgactggaaaggtgtagagccgatttacgaaaccatgccgggctggtctgaatccaccttcggcgtgaaagatcgtagcggcctgccgcaggcggcgctgaactatatcaagcgtattgaagagctgactggtgtgccgatcgatatcatctctaccggtccggatcgtactgaaaccatgattctgcgcgacccgttcgacgcgtaattctggtacgcctggcagatattttgcctgccgggcgaacagtgtgatacattgctgtgtcgggtaagccattacgctatccgacacagtgttaaatcctcgcttttttccttccccgaactgaaataaattagcgacacagcttgtggctggtttatcatcaatataaatgtattttttcccgatttcccttttgaggttgatgtgcagttaacgagtttcactgattacggattacgtgcgctgatctacatggcgtcattgccagaagggcggatgaccagtatttctgaagtgactgacgtctacggcgtctcccgtaatcatatggtcaaaataatcaatcaacttagtcgtgccggctacgtgactgctgttcgtggaaaaaatggcggcattcgcctgggtaaaccggcgagtgcgatacgtattggtgatgtggtgcgcgagctggagcccttatcgctggtgaattgcagcagtgagttttgccacattacacctgcctgtaggttgaaacaggcactttctaaggccgtgcaaagttttcttacggaactggataactacacgcttgccgatttggttgaagagaatcaaccgctttataaattattgctggtggagtgacgaaaatcttcatcagagatgacaacggaggaaccgagatgtcacaagatcctttccaggaacgcgaagctgaaaaatacgcgaatcccatccctagtcgggaatttatcctcgaacatttaaccaaacgtgaaaaaccggccagccgtgatgagctggcggtagaactgcacattgaaggcgaagagcagcttgaaggcctgcgtcgccgcctgcgcgcgatggagcgcgatggtcaactggtcttcactcgtcgtcagtgctatgcgctgccggaacgcctcgacctggtgaaaggtaccgttattggccaccgtgatggctacggctttctgcgggttgaagggcgtaaagatgatttgtatctctccagcgagcagatgaaaacctgcattcatggcgatcaggtgctggctcagccgctgggtgctgaccgtaaaggtcgtcgtgaagcgcgtattgtccgcgtactggtgccaaaaaccagccagattgttggtcgctactttaccgaagcgggcgtcggctttgtggttcctgacgacagccgtctgagcttcgatatcttaatcccgcccgatcagatcatgggcgcgcggatgggctttgtggtcgtagtcgaactgactcagcgtccgactcgccgcaccaaagcggtgggtaaaatcgtcgaagtgctgggcgacaatatgggcaccggcatggcggttgatatcgctctgcgtacccatgaaattccgtacatctggccgcaggctgttgagcaacaggttgccgggctgaaagaagaagtgccggaagaagcaaaagcgggccgtgttgatctgcgcgatttaccgctggtcaccattgatggcgaagacgcccgtgactttgacgatgcagtttactgcgagaaaaaacgcggcggcggctggcgtttatgggtcgcgattgccgacgtcagctactatgtgcgtccgtcaacgccgctggacagagaagcgcgtaaccgtggcacgtcggtgtacttcccttcgcaggttatcccgatgctgccggaagtgctctctaacggcctgtgttcgctcaacccgcaggtagaccgcctgtgtatggtgtgcgagatgacggtttcgtcgaaaggccgcctgacgggctacaaattctacgaagcggtgatgagctctcacgcgcgtctgacctacaccaaagtctggcatattctgcagggcgatcaggatctgcgcgagcagtacgccccgctggttaagcatctcgaagagttgcataacctctataaagtgctggataaagcccgtgaagaacgcggtgggatctcatttgagagcgaagaagcgaagttcattttcaacgctgaacgccgtattgaacgtatcgaacagacccagcgtaacgacgcgcacaaattaattgaagagtgcatgattctggcgaatatctcggcggcgcgtttcgttgagaaagcgaaagaaccggcactgttccgtattcacgacaagccgagcaccgaagcgattacctctttccgttcagtgctggcggagctggggctggaactgccgggcggtaacaagccggaaccgcgtgactacgcggagctgctggagtcggttgccgatcgtcctgatgcagaaatgctgcaaaccatgctgctgcgctcgatgaaacaggcgatttacgatccagaaaaccgtggtcactttggcctggcattgcagtcctatgcgcactttacttcgccgattcgtcgttatccagacctgacgctgcaccgcgccattaaatatctgctggcgaaagagcaggggcatcagggcaacaccactgaaaccggcggctaccattattcgatggaagagatgctgcaactgggtcagcactgttcgatggcggaacgtcgtgccgacgaagcaacgcgcgatgtggctgactggctgaagtgtgacttcatgctcgaccaggtaggtaacgtctttaaaggcgtaatttccagcgtcactggctttggcttcttcgtccgtctggacgacttgttcattgatggtctggtccatgtctcttcgctggacaatgactactatcgctttgaccaggtagggcaacgcctgatgggggaatccagcggccagacttatcgcctgggcgatcgcgtggaagttcgcgtcgaagcggttaatatggacgagcgcaaaatcgactttagcctgatctccagcgaacgcgcaccgcgcaacgtcggtaaaacggcgcgcgagaaagcgaaaaaaggcgatgcaggtaaaaaaggcggcaagcgtcgtcaggtcggtaaaaaggtaaactttgagccagacagcgccttccgcggtgagaaaaaaacgaagccgaaagcggcgaagaaagacgcgagaaaagcgaaaaagccatcggcgaaaacgcagaaaatagctgcagcgaccaaagcgaagcgtgcggcgaagaaaaaagtggcagagtgatcaataccctctttaaaagaagagggttagattgctgacaaaatgcgctttgttcatgccggatgcggcgtgaacgccttatccggcctacataatcacgcaaattcaatatattgcagagatcatgtaggccggataaacgtagtgcatcaggcaaaacgtaaacaacgagtacattaatgagcgaaatgatttacggcatccacgcagtgcaggccctgctggagcgcgcccctgaacgttttcaggaagtctttattttaaaaggccgtgaagataaacgtctgttaccgctgattcacgcccttgagtctcagggcgtggttatccagttggcaaaccgccaatatctcgacgagaaaagcgacggtgccgtgcatcagggcattatcgcccgcgtgaagccaggacgtcagtatcaggaaaacgatctgccggatctgatcgcttcgctcgatcaaccgttcctgctgatcctcgacggcgtaaccgatccgcacaacctcggcgcgtgcctgcgtagtgcggacgccgcaggcgttcatgcggtgattgtgccgaaagatcgctccgcacagctcaacgctacggcgaaaaaagtagcctgcggcgcggcagaaagcgttccgctgattcgggtgactaaccttgcgcgcaccatgcgtatgttgcaggaagagaatatctggatcgtcggtacggcaggcgaggcggatcatacactctatcagagcaaaatgaccggacgcctggcgctggtgatgggtgcggaaggtgaaggtatgcgtcgcctgactcgtgaacattgcgatgagttgatcagcatcccgatggctggaagcgtttcttccctgaacgtttcggttgcgaccggaatttgcttatttgaagcggtgcgccagcgcagctaatttctcagaattatgaaaagccatccagatttggatggtttttttttgtctatagctggtaagataattacgtattgcaaatattcattttattaatatttaaacttaatctatatggaataatatatgacatggaatccgttggcgctagcgacggcgctgcaaactgtacctgaacaaaatattgatgtaacaaatagcgagaacgcattaattattaaaatgaatgattatggcgatttgcaaatcaatattctttttacttcccgccaaatgattatcgaaacctttatttgtccggtgagtagtatcagcaatccagatgaatttaataccttcttattaagaaatcagaagatgatgccgttgtcatcggtagggatctccagcgtacaacaggaagagtattacattgttttcggggcgttatcgcttaaatcttctcttgaagatatcctgcttgagataacctcgctggtagataacgcattggatctggctgaaattacagaagaatattcacactaattacaaggacgggtatttatgggaattttaaaaagtttatttacgctggggaaatcgtttatctcccaggcggaagaatccattgaagaaacccagggcgtgcgcatgctggaacagcatattcgtgacgctaaagctgaactcgataaagccggaaaatctcgcgttgatctgctggcgcgggtgaaattaagtcacgataagctgaaagatttacgtgagcgcaaagccagtctggaagcccgtgcgctggaagcgttaagcaagaacgttaatccgtcgttgattaacgaagttgctgaagaaatcgcgcgccttgagaatctcattaccgctgaagagcaagtgttgtcgaatctggaagtctcccgtgatggcgtggaaaaagcagttacagcgacagcgcagcgtatcgctcagtttgagcagcaaatggaagtcgttaaagccactgaagccatgcagcgtgcacaacaggctgtaacaacctctaccgttggcgcatcttccagcgtttcgacagcggcagaatccttaaaacgcctgcaaacgcgtcaggccgaacgtcaggctcgcctggatgctgccgcacagttggagaaagtcgcagacggtcgcgaccttgacgaaaagctggcggaagccggaattggcggtagcaataaaagtagcgcccaggatgtattagcaagactgcaacgccaacagggcgagtaatttttttgccagcctcgctaaaaggctggcaactattttaaggataaaatatgtctggttttttccagcgtctgtttggcaaggataataagccagctatcgctcgtggtccgctgggacttcatctcaatagtggctttacgctcgacacgttagcgtttcgtttgctggaagatgaattgctgattgcgctgccgggtgaggaatttacggtagccgccgtcagccacatcgatctgggcggcggtagtcagattttccgctactacacttcaggcgatgagtttctgcaaatcaataccaccggcggcgaagatattgatgacattgatgatatcaagctctttgtctatgaagagagctacggtatcagtaaagagagtcactggcgcgaggcgatcaacgccaaagcgatgggagcaatgaccttaaactggcaggaaaaacgctggcagcgattttttaacagcgaagaaccgggaaatatcgaacccgtctacatgctggaaaaagtagaaaatcaaaaccatgccaaatgggaggtccataattttaccatgggctaccaacggcaagtaaccgaagatacttacgaatatttgctgctaaatggtgaggaatcttttaacgatctcggcgagccagagtggttattttcgcgcgcgttgggtgtcgatatcccgctgacatcacttcatattattggttaattacaaggacgtttacaatgcatatactggattcacttcttgcctttagcgcctatttttttattggcgtggctatggtgattatttttctgtttatctattctaaaattacaccgcacaacgaatggcagttaatcaaaaacaataataccgcggcgtcactggcgttcagcggtacattgttgggttacgttatccccttatccagtgcggcaatcaatgcggtgagtattccagactatttcgcctggggcgggattgcactggtgattcagttactcgtttttgctggtgtcagactttatatgcccgcattaagcgaaaaaattattaatcacaataccgcagcaggaatgtttatgggaaccgccgcgctggctggcggtatttttaacgcagcttgtatgacatggtaatggacgatcatggccagaaaacgcaaatcaagaaataacagtaaaattggtcacggagcgattagtcgcattggtagaccgaataatccttttgaaccgtgccgcaatcgctacgcacaaaaatacttaacgttggcgctaatgggcggtgccgcttttttcgtattgaaaggttgtagcgatagtagcgatgtcgataacgacggcgacggaacgttttacgcgacagtgcaggattgtattgatgacggtaataatgccgacatttgcgcgcgtggctggaacaacgccaaaacggcattttatgccgatgttccgaagaatatgactcagcagaactgtcagtctaagtacgaaaattgctactacgacaatgttgaacagagttggatcccggtcgtttctggatttttgttaagccgggttattcgtaaagatcgcgatgagccgtttgtttataacagcggcggttcctcttttgcttcgcgcccagtctggcgcagcacttctggtgattactcctggcgctccggttctggcaaaaaagagtcttactcttcgggcggctttaccaccaaaaaagcgtctaccgtttctcgcggcggctatggtcgttcttccagcgcccgtgggcattggggaggctaatcatgctgagacacaacgttcctgtgcgacgggatctggaccagatcgccgctgacaacggtttcgactttcatatcatcgacaatgaaatctattgggatgagagtcgggcttaccgttttactctgcgccagattgaagagcagatcgaaaaaccgactgcggaactgcatcagatgtgccttgaggtggtggatcgcgcggtaaaagatgaagagatcctgacgcaactggcgatcccgccgttgtactgggatgtgatcgctgaaagctggcgcgcccgcgatccttcgctgtatggacggatggattttgcctggtgtggcaatgcgccggtgaagctgctggagtacaacgccgatacgccaacttcattgtacgagtcggcttatttccagtggctgtggctggaggatgcccggcgcagcggcattattccgcgtgatgccgatcagtacaatgctattcaggaacgcctgatttcacgctttagcgagctttacagtcgggaaccgttttatttttgctgctgtcaggacaccgatgaagacaggagtaccgtgctgtacttgcaggactgcgcccagcaggcagggcaggagtcgcggtttatctacattgaagatctcggtttgggcgtcggcggcgtactgaccgatcttgatgataatgtcatccagcgtgcatttaagctgtatccgctggagtggatgatgcgtgacgataacggtccgctgctgcgcaagcgtcgcgagcaatgggtggagccgttatggaaaagtatcttgagtaataaagggctaatgccgctgctttggcgcttcttccctggtcatcctaatcttcttgcgtcctggttcgatggcgagaaaccgcagattgccgctggcgaaagctatgtgcgtaaaccaatctattcgcgcgaaggcggcaacgtcaccatttttgacggcaagaataacgttgttgaccacgctgatggtgattacgccgatgaaccgatgatctaccaggcgtttcaacctctgccgcggtttggcgatagctacacactcatcggtagctggattgtcgatgatgaagcgtgcggaatggggatccgtgaagataacacactgatcaccaaagacacctcacgtttcgttccgcattacattgctggataagaatgttttagcaatctctttctgtcatgaatccatggcagtgaccatactaatggtgactgccattgatggagggagacacagtgcactggcaaactcacaccgtttttaatcaacctataccattaaataacagcaacttatacctgtctgatggcgcgctctgcgaagcggtaacgcgtgaaggtgctggctgggatagcgattttctagccagtattggtcagcagttaggaacggctgaatcccttgaactggggcggctggcgaatgtgaatccgcctgaattattgcgctacgatgcgcaaggacgccgtctggacgatgtgcgttttcaccccgcctggcacctgctgatgcaggcgctatgtaccaatcgggtgcacaatcttgcctgggaagaagacgctcgctccggcgcatttgtggcgcgcgcggcgcgttttatgttacatgcgcaggttgaggcagggtcgttatgtccgataaccatgacctttgccgccacgccattgttgttacagatgttacccgcgccgtttcaggactggaccacgccgctattgagcgatcgctacgattctcacttattgccaggtgggcaaaaacgcggtttgttgattggcatgggaatgacggaaaagcagggcggttccgatgttatgagcaacaccacccgtgcagagcgtctggaagatggctcttatcggctggtggggcataaatggtttttctcggttccgcaaagcgatgcgcatctggtgctggcgcagaccgcgggtggtctgtcctgcttttttgtgccgcgctttttgcctgacgggcaacgcaacgcgattcgcctcgagcggctgaaagataagctgggtaatcgctctaacgccagttgcgaagtggagtttcaggatgccattggttggttgttggggctggaaggggaaggaattcgtctgatcctgaaaatgggtgggatgacgcgttttgattgcgccctgggtagccatgccatgatgcgccgtgcattttcgctggcgatttatcatgcacatcaacgccatgtttttggtaatccattgatccaacagccccttatgcgtcatgtcttaagtcgcatggcacttcagcttgaagggcaaacggcgttgctgtttcgtcttgcgcgagcgtgggaccggcgtgccgatgccaaagaagccctgtgggcgcgtttatttacgcctgcggcaaaatttgtgatctgcaaaagaggtatgccgtttgtggccgaagcgatggaggtgctgggcggcattggttattgcgaggagagtgagctgccgcggctttaccgggagatgccggtaaacagtatttgggaaggttccggcaatattatgtgcctggatgtgttgcgcgttctcaataagcaagcgggcgtatacgacttattgtcggaagcatttgtggaagtgaaagggcaggatcgctattttgatcgcgcggttcgtcgtttacagcagcagctgcgtaagccagctgaagaactggggcgagagattactcatcagctattcctgctgggctgcggtgcgcaaatgttgaaatatgcttctccgccaatggcgcaggcgtggtgtcaggtgatgttagatacgcgcggcggcgtacggttgtcagagcagatccagaatgatttattgctgcgggcgacggggggagtgtgtgtgtaagcgtatacgactgatgcgacgctggtttcgattaactaaatgaaatatgtgaaaattgtaggccggacaaggcgctcgcgccgcatccggcattgttcatttgctgtagatgacactcatgcatacagtatcgcctgtacgcgccagttatcaggctgctggtcttcgtacatggtaataatgcggtaccatgacgcaccttgttcatcggcctttaacgccacgatacgttccacgtcctgcggatcccctgaaatattgctaactgagatctgacctatttcattcaggcccgtcacgcagtcagcactggcgaattctgcagactgtgccgtggcgctcgcaggataagtcactaattgcagcgagggtgaggcaagtaattgtttcatcgtcagctccatttttcgtttccccacatgttgcagggcattccatcgcggtaataaacgcccaggcttccagccggtaatttattgtgcacaggtaaacgcatagggacgcaaagcaatgtaaagctgactatgtaagttgtctgatttatttacggtacaaaatggcttgtgaataccactgtcctgtcacgatggtttcgtccaccatgacgacaacgtaataatcagcttttgcagcgacagctttcgctttgatttctgctaatgcgtcatccggagaaccccgaaccatcgtgcttacgctacctattcgctgtaacccttgcgtctggtcgcggcgaatctcttgcggatggtccgttactggcggtgctggctgtggcgtaccttgcagtgcgctacaggcacttaacatcaacaccaataataaactggcaaaccggtaaataacgctattacgtttcctgctaaccatagtgtagtgccttattaatttaactttgggggaatgttcccgaattgttacctggtacgcgattttcgaatgaaaacgtgacgaaagcgtaacccacatctcaacattatgaactaataccgccagcagaaacttgtgctaaggatttcttcatgtcataccagacaaaaaggagagacagatgattgaaatagaatcacgcgagctggcagatattcccgttcttcatgcttatcctgtcgggcaaaaagataccccgttaccgtgcgtaattttttatcacggctttacttcatccagtctggtgtatagctattttgccgttgcgctggcgcaggctggtttgcgggtgatcatgccggatgcgcccgatcacggtagccgttttagtggtgacgcagcgcggcggttaaatcaattctggcaaatcttgctacaaagtatgcaggaattcactactttacgtgcggcaatagccgaagaaaactggctgcttgatgaccgtctggcagtcggtggcgcgtcgatgggcgcgatgacggcactggggattaccgctcgccaccccacggtgagatgtaccgccagcatgatgggatcgggctattttacatcactcgcccgttcactgtttccaccgctgatacctgaaacggcagcacagcagaatgaattcaataacattgtcgcgccactggcagagtgggaagcgacaaaccacctggaacaacttagtgacagacctctactgctgtggcatggcctcgacgatgacgttgtgcctgccgacgaatcactacgtttgcagcaggccttaagcgagacgggacgggataaactgctaacctgttcatggcagccaggcgtgcgtcaccgcattacgcctgaggcgttagatgctgccgtgacatttttccgccagcatctttaaacacgcagaatgctgaccccttgcgcttccagttgttgcaggatttccgggttagcatttttgccggtgataagcatatcgatttgatcggcacggctaaaaagcattcccgcgcgttcgccaatcttactgctatcaaccagtaccaccagtttccctaccacgctcagcatcttctgctctgccattgctgtcagcatatcggttttatacaacccttctgcggtcagcccttttccgctggtaaacatccagtgcccggcatagagactgttttcgctgccctgcgggcttaaagtgatggactgacttttgttgtactgtccgcccataatgatcacgctgtcatgttcttgatcgatcaggtaatttgccagcggtagataattagtgatgatttgcactggcttgccacacatttcccgcccaagcagaaacgcggtggagccgcagttgatgactacgctttcgcccggattaaccagctgcgaggccgctttagcgatacgtactttttcatcgtgattctgcgcctgatgcagattcatcggcgtccagcgcgggcgctgttgggtaatagcttctgcgccattgcgcacttttttcagtttgccgctttcgtcaagtttattgatatcgcgtcgcgcagtggcaggcgaaattcccagacgctcaacgactttctcaacggtcacaaagcccaattgtgcgagcatttccaggaggatttgatgtctttgtgcttcagtcatgagctattccgataaaatttgatttttttagatgatatttgaaatagccaggaaatactacgccggatagcgcgaacttctccacgctacccggtataaacgacagattacaggaatgacttgaacggcagatccggttcaatagtgaagcaatcatcgaaaccgcgcggatagtggtactcgaagttgtctttatccagcggccaggtaaatttgccacccacctgccagataaacggcttgaagccatacttcaggcgatcttttttcatctcccacagcacgcggatctcttgcggatcggcctggaagtttgaccagatatcgtggtggaacgggatcactactttcgcattcagcgcttcacccatacgcagcatatcggcgctggtcattttgtcggtgataccgcgcgggttttcgccgtacgatcctaacgccacgtcgatctgatgttcgttaccgtgcttcgcataatagttagagtagtgggagtcgccgctgtgatacagggagccgccaggcgttttgaacaggtagttcaccgcgcgatcgtccatgccatctggcagtacgccagccgctttttgatcggcaggcagggtgatcagtgcagtacggtcgaaagcatcaagcgcatgaatttcaatgtctttcacttttactacatcgcccggtttgaccacgatgcaacgctctttcggtacgccccagccaatccacaaatccacacaggttttcggtccgataaacggtacgtcatctgcacaattctgcatcacggcagcagcgacgttaacgtcgatatgatcgttgtgatcgtgagtcgccagtaccgcgtcgatctggcgaatcgcaaacggatcaagaacaaacggggtggtacgcaggtttggctgcagttttttcacgccagccatgcgctgcatctggtgaccctgtttcattaacgggttaccgtgactttgtttgccagtgccgcaccagaaatcaacgcaaacgttggtgccaccttccgatttcaaccagatcccggtgcagccaagccaccacatcgcaaatgtgccaggagcgacctgttcttgttcaatttcttcattcaaccagctaccccactccgggaaagtgctcaggatccaggattcacgggtgatacttttcactttactcatcgccatttaccttcatgatagttcaattcgaatcaatatgtgattggttttgattaatcctgacactattttttcaggaaggcaatgaccattttttgactttttgccagggaagttgttgttgattttgagtatggaaagatttaatggaatgtgtaattcaattaactaaatgaatttaaatggataattgtttcgttgtgtgaatcccactctatccatgtggaattatttgcgggtcgcgtcacatttaatcataaataatcttgttgtgattacttttgaaaattagagtgagtgcacaacattccgggtgtgtggaatacccggttacctcttcttcaggagatcgttatggagatcctctacaacatctttaccgtgttttttaaccaggtcatgaccaatgccccgttgttgctgggtattgtgacctgtctgggctacatcctactgcgcaaaagtgtcagcgttattattaaaggcacgattaaaaccataattggtttcatgttgttgcaggcagggtccggcatcctcaccagcaccttcaaaccggtggtggcgaaaatgtccgaagtctacggcattaacggcgcaatttccgatacctacgcttcaatgatggcaaccatcgaccgcatgggcgatgcctatagctgggtgggttacgccgtattgttagcgctggcgctgaacatctgttacgtgctgttgcgtcgcattaccggcattcgcacaatcatgttgaccggccacatcatgttccagcaggccgggttgattgccgttacgctgtttatcttcggctactccatgtggaccaccattatctgtaccgcgattctggtttcgctctactggggcatcacttccaacatgatgtacaagccgactcaggaagtgacggatggctgtggtttctccatcggtcaccagcagcagtttgcatcatggattgcctataaagtcgcgccgttcctcggcaaaaaagaggagagcgttgaagacctcaaattgccgggctggctgaacattttccacgacaacatcgtctccacggcgattgtgatgaccatcttctttggtgccattctgctctccttcggtatcgacaccgtgcaggcgatggcaggcaaagtgcactggacggtgtacatcctgcaaactggtttctcctttgcggtggcgatcttcatcatcacgcagggtgtgcgcatgtttgtggcggaactctctgaagcatttaacggcatttcccagcgcctgatcccaggtgcggttctggcgattgactgtgcagctatctatagcttcgcgccgaacgccgtggtctggggctttatgtggggcaccatcggtcagctgattgcggttggcatcctggtcgcctgcggctcctcgatcctgattattcctggctttatcccgatgttcttctctaacgccaccatcggcgtgttcgctaaccacttcggcggctggcgtgcggcgctgaagatttgtctggtgatggggatgatcgaaatctttggttgcgtctgggcggtgaaactcaccggtatgagtgcctggatgggcatggcggactggtcgattctggcaccgccgatgatgcaaggcttcttctccatcggtatcgcctttatggccgtcatcattgtaattgcactggcttatatgttcttcgctggccgcgcgctgcgcgcagaagaagatgcagaaaaacaactggcagaacagtctgcttaataaggagttttgattatgaccgtacgtattctggctgtgtgtggcaacggacaaggcagttccatgatcatgaagatgaaagtggaccagtttttaacccaatcaaacattgaccatacggtaaacagctgcgcggttggcgagtacaaaagcgagttgagtggcgcggatatcatcatcgcttctacgcacattgcgggcgaaatcaccgtgaccggcaacaaatacgtggttggcgtgcgcaacatgctctctcctgccgactttggcccgaaactgctggaagtgatcaaagagcatttcccgcaggatgtgaagtaaggacgcgccatgaaattacgtgattcgctggcggaaaataaatccatccgcctgcaggctgaagcagagacatggcaggaagcggtgaaaatcggcgttgacctgctggtggcggcagatgtggtagagccgcgttactaccaggcgattctggatggcgttgaacagttcggtccttatttcgttatcgctccgggcctggcaatgccgcacgggcgtccggaagagggcgttaagaaaaccggtttctctctggtaacgctgaaaaagccgctggagttcaaccacgatgacaacgatccggtggatatcctcatcaccatggcggcggtcgatgccaatactcaccaggaagtgggcatcatgcagatcgtcaacctgtttgaagatgaagagaattttgaccgtttacgcgcctgccgtaccgagcaggaagtactggatctcattgaccgcaccaacgcggcagcttaagaaggaattgaacatgtcattaccgatgttgcaagtcgcgctggacaaccagactatggatagcgcctacgaaaccactcgcctgattgccgaagaagtcgacattatcgaagtgggcaccattctgtgcgtgggcgaaggcgtgcgtgcggttcgtgacctgaaagcgctctacccgcacaaaatcgtactggcagacgccaaaattgccgatgcaggcaaaatcctttcgcgtatgtgcttcgaagccaacgctgactgggtgacggtaatttgctgtgcggatatcaacaccgccaaaggcgcgctggacgtggcaaaagagtttaacggcgacgtgcagatcgaactgaccggttactggacctgggaacaggcgcaacagtggcgcgatgcaggcattgggcaggtggtttatcaccgcagccgtgacgcgcaggccgcaggcgtggcgtggggcgaagcggacatcaccgcgatcaaacgtctttccgatatgggcttcaaagtcaccgtcaccggaggcctggcgctggaagatctgccgctgttcaagggtattccgattcacgtctttatcgcgggccgtagtatccgtgatgccgcttctccggtggaagccgcacgtcagttcaaacgttccatcgctgaactgtggggctaaggagcggatatgttgtccaaacaaatcccgcttggcatctatgaaaaagcgctccccgccggggagtgctggctggaacgcctgcaactggcaaaaacgttaggcttcgattttgtcgaaatgtcggtagatgaaactgacgatcgcctgtcgcgcctcaactggagccgcgagcagcgtctggcgctggtcaatgcgattgttgaaaccggcgtgcgcgtgccgtccatgtgcctttctgctcatcgtcgtttcccgctgggcagtgaagatgacgcggtgcgggcgcaggggctggagattatgcgtaaagctatccagttcgcccaggatgtcggtattcgcgtgatccagctggcgggctatgacgtttactatcaggaagccaataacgaaacgcgtcgtcgtttccgtgacggcctgaaagagagcgttgagatggcaagccgcgcgcaggtgacgctggcgatggagatcatggattatccgttgatgagctccatcagcaaggcgctgggatacgcgcactatctcaacaatccgtggttccagctctacccggatatcggcaacctgtcggcgtgggacaacgatgtgcagatggagttgcaggccggaatcgggcatatcgtcgcggtacatgtgaaagacaccaaacctggcgtcttcaaaaacgtgccgtttggcgaaggtgtagtggatttcgaacgttgtttcgaaacgctcaaacagagtggctattgcgggccgtacctgattgagatgtggagcgaaacggcggaagacccggcggcagaagtggcgaaagcgcgtgattgggtgaaagcgcgcatggcgaaagcgggcatggtggaggcggcataatgcaaaagctaaaacagcaggtatttgaagccaacatggagctgccgcgctacgggctggtgacctttacctggggcaacgtcagcgctatcgaccgcgaacgcgggctggtggtgatcaagcccagcggcgttgcctacgaaaccatgaaagcggccgatatggtggtggttgatatgagcggcaaggtggtggaaggggagtatcgcccatcttccgacactgcgacgcatctcgaactctaccgtcgttacccgtcgcttggtggcattgtccatacccactccactcatgccaccgcatgggcgcaggcggggctggcgatcccggcgttaggcaccacgcacgccgactacttctttggcgacattccgtgtacgcgcgggttaagcgaagaagaggtgcagggcgagtatgaactgaacaccggcaaagtgattatcgaaacgctgggcaacgccgagccgctgcatacgccgggaattgtggtgtatcagcacgggccgttcgcctgggggaaagatgctcacgatgcggtgcataacgcggtggtgatggaagaagtggcgaaaatggcgtggattgcccgcggcattaacccacaactcaatcacatcgacagcttcctgatgaataaacacttcatgcgtaaacacggtcctaacgcttattacgggcagaagtagaacacgcgctgcggaaatttccttcctcgggagataactggtctaattccgcagccgtttttcaaaaaaaagccccctgcgaagggggcaaagcaaactatggcaatgtttcgttggttatacctggtgctagcgataaatatccgcgctggcgtgcatattgccgttactccccggttcccgcatcagaattacgtggtagtacgttgcgccttgcgcatctgtttcttcatttaatgcctgacgtgcttcgctttcagtggcgaaattatgattgatataaatcacgcctaagctttgcacatcgtccatatttctggcctggtggttattaatttcaatggctgcccatgtatttgcacttagcaaaagcacagccagaagggctaaaacacgactgaacatagatacctcctcgacggctgactttgtgtgctctcctctgtgatgatcttctgatttaattttaatcaatgataaagaagttgatggtgaccatttctgatgcagttgttcaaaaaaacaccatgatgaagtgtgatgaacttcaaatcagcgtgttagaggttaattgcgaaaggggagatttatttcggctctgcccttgagtttagcgaggcatacaagtactataacgcgtcatttttcagccgacctttaacacgttccttgcctccccgggattcggctgacccagacaggaggctgaataatccgtaaggagcaattcgatgcgtcattacgaaatcgtttttatggtccatcctgaccagagcgaacaggttccgggcatgatcgagcgctacactgctgccatcactggtgcagaaggcaagatccaccgtctggaagactggggccgccgtcagctggcttacccgatcaacaaactgcacaaagcacactacgttctgatgaatgttgaagctccgcaggaagtgatcgatgagctggaaactaccttccgcttcaacgatgccgttatccgcagcatggttatgcgtaccaagcacgctgttaccgaagcatctccgatggttaaagcgaaagacgagcgccgtgagcgtcgcgatgatttcgcaaacgaaaccgctgatgatgctgaagctggggattctgaagagtaatttctgatgaccaaccgtctggtgttgtccggcaccgtgtgcagggctccccttcgaaaggtcagtccatcaggaattcctcactgccagttcgtgcttgagcatcgttctgtgcaggaggaagccggctttcaccggcaggcgtggtgtcaaatgcccgttattgttagcggacacgaaaaccaggccattactcacagtataacggtcggcagtcgcataaccgttcaggggttcatttcatgccacaaggcaaagaacggactgagcaaaatggttttgcatgccgagcagattgaattgatagattctggagactagccatatggcacgttatttccgtcgtcgcaagttctgccgtttcaccgcggaaggcgttcaagagatcgactataaagatatcgctacgctgaaaaactacatcaccgaaagcggtaagattgtcccaagccgtatcaccggtacccgtgcaaaataccagcgtcagctggctcgcgctatcaaacgcgctcgctacctgtccctgctgccgtacactgatcgccatcagtaatcggtcacggtccattaatacgactttgagaggataaggtaatgcaagttattctgcttgataaagtagcaaacctgggtagcctgggtgatcaggtaaacgttaaagcgggctatgctcgtaacttcctggtaccgcagggtaaagctgttccagctaccaagaaaaacattgaattcttcgaagctcgtcgcgctgaactggaagctaaactggctgaagttctggcagctgctaatgctcgcgctgagaaaatcaatgcactggaaactgttaccatcgcgtctaaagctggcgacgaaggtaaactgttcggttccatcggtactcgcgacatcgctgacgctgtaactgcagctggcgttgaagtggctaagagcgaagttcgtctgccgaacggcgttctgcgtaccactggcgaacacgaagtgagcttccaggttcacagcgaagtattcgcgaaagtgatcgtaaacgtagtagctgaataattcgttattcaacgagacgtaaaaacgccgaccattggtcggcgttttgctttctatttttcgtcaggtattagtttcgcaagtagatccattcaccattctcttgtgtccataagtcaggatggtttgctggcgttagatacatacgagcgcaactgatgtctcgctcctgcggcactcgctcgaaacccaaacccgagtagattgcggctgaacttgataaggaacgcagaccaattttcaaatcatggggtaaatcagaatacgcgtttagcaatgcagcaatgatgaatccgagggcattagaaacgcctgtaacagtgcgaagttggtcgatataaagatcgattgttggtagttcagatgaccagcaattaggcatttgggcaggaagggttacaacgtatcctatcgtttggccggtatagtctggagtaccataaccaggtcccaaaaccacttcgtgtattgtgtatttactgttgggttcgaaggattcgacatcttgcaataaatatttcagttctgcggttaacctcgcacccgcgtaagctttattgtatttctgggcgtgaatattatctaatgtagcttcatggttccatccaaaagaattatcaccattcattgtgattccatcgtaagcattacacctcgtcgctaacttattgaatgcttgccagtctgagagatctagtttgtggatctcaacagtacgtctgccatcgcaattatgatctcttccacgatttgaaagtaatgtagcgcgtgcgtattgatgaaattttaattttactggtttgtcggtggacgaaaaacgagataaatatgcaggaaatgaataaatagtcgttggtaatgtcattgtaatgttacctgtttaatgtttttataaatatcgcagctgaatgttcacagaaaaaaatcgatattaataaaaataagtttgttttctgaagtggtgaaaatagcggatggtgaaagatattaatatcaaaaatcgctcattatggatataacgatgcacccggggagaaaatgacttccacgccttacaccgtacattcttgttgtgcggtatgtaattattctacgctgtcggtatcggtgtattcgttaatcagcaggttagccagccacaaaaagccattgagaaaattattgattttacatgggattattatattgctaatccttggtttttaaaaattgtgcatagtgaaaatcaaagtaaaggtgtgcattatgcaaaatcacagcgtctcttagaaattaaccatgcgcacttgcagttaatggaatccttattggatgaagggaagaaacacaatatttttaagccagatatcgacccattgcaggtgaatattaatattgctgcgcttggcggatattatttgatcaaccagcatacgcttggcctggtttatcacatcagtatggtttcaccccaggcactggaagccagacgtaaggtcatcaaagagacaatccttagctggcttttggttgacccttcatctaccgcgcacgaataaaactgccatccggctggcgggtgaacaggacctgttgattattccccgtatcaatggttaagcccgtcaccacgccgctggcgttctggcggattttcaccatctgcccgttttgcaaattactcagcggcttacccgcgccttctacctgcgccattgcatagacatcggtagcgggcagtccgtggtcgcggaacagctgcgccatcgttttaccgggttcgacacggtaagagcgccattgattatcaattccgctatctggctggaatggttgcgtttgggtagtttgcggctgctcttctggctggccttcctgtataggttctggagcgaccggagccacctgatcaggatcattttgtggggtaactaattgcgcccgcagctgttcttctgtcggcggttgtgattgcgactgaatatctaactgcgcttcacgcgtcaccaccggcgcgttgggcgtatcatcagatggaagcagaaatccgaccaccaatacaatggcggcaataatgatcccccgacgatgcatcggcggcagcgggtccatgaagcgaaaattgtccggcgcgtgccagactttctccagggttggttttagttcaaagcgcccgggcatggtttcctcctgctccgcgtcttgttcctcaatcatagcctatgaataagctaacgctatgatgtccgtggtaaacccgcctttattatattcatacgggatattgctattgtttctttttccctgggatttgtcatcattcccgcgacaaagttttacccaaagaagtgtggctgatatgctgcccgctactttataccctaagaaaggaaatacgatgaccaccccaacttttgacaccatcgaagcgcaagcaagctacggcattggtttgcaggtagggcaacaactgagtgaatctggcctggaagggctgctgccagaagcactggttgcaggtattgccgatgcgctggaaggcaaacatccggctgttccggttgatgtggtgcatcgcgcgctgcgtgaaatccacgagcgcgccgatgccgttcgtcgtcagcgtttccaggcgatggctgctgaaggtgtgaaatacctggaagaaaacgccaaaaaagaaggtgtgaatagcaccgaatctggcctgcaattccgcgtgatcaaccagggtgaaggcgcaattccggcacgtaccgaccgcgttcgtgttcattacaccggtaaactgatcgacggcaccgtgtttgacagctccgttgctcgtggtgaacccgctgaattcccggttaatggcgtgatccctggctggattgaagcactgactctgatgccggtaggttctaaatgggaactgactatcccgcaggaactggcatatggcgagcgcggcgcaggcgcatccatccctccgttcagcaccctggtgtttgaagtcgaactgctggaaatcctctaagcagcgcattctgttcccctcgaacgagaggggagcaggcattcagcaataaacccttcagtttgccaaacggcgctattttgtgttgcaaagaccccgtaagcgtgtatttttgtgagctgtttcgcgttatcaccgtgatatgacactcactttaaacataaaattaacattagatctaaatcttagtattcatcccgcgtattgttacctaatatcgatgagtcccgatacagattcgtcgtatcatagactgactaaaggccgtagagcctgaacaacacagacaggtacaggaagaaaaaaacatggtagatcaggtaaaagtcgttgccgatgatcaggctccggctgaacagtcgctacggcgcaatctcacaaaccgacatattcagcttattgccattggcggtgccattggtacggggttgtttatggggtctggcaaaacgattagccttgccgggccgtcgatcattttcgtttatatgatcattggttttatgctctttttcgtgatgcgggcaatgggggaattgctgctttcgaatctggaatacaaatcttttagtgacttcgcttccgatttactcgggccgtgggcaggatatttcaccggctggacttactggttctgctgggttgtaaccggtatggcagacgtggtggcgatcacggcttatgctcagttctggttccccgatctctccgactgggtcgcctcgctggcggtgatagtgctgctgctgacgctcaatctcgccaccgtgaaaatgttcggtgagatggagttctggtttgcgatgatcaaaatcgtcgccattgtgtcgctgattgtcgtcggcctggtcatggtggcgatgcactttcagtcaccgactggtgtggaagcgtcattcgcgcatttgtggaatgacggcggctggttcccgaaaggtttaagtggcttctttgccggattccagatagcggttttcgctttcgtggggattgagctggtaggtacaacagctgcggaaaccaaagatccagagaaatcactgccacgcgcgattaactccattccgatccgtatcattatgttctacgtcttcgcgctgattgtgattatgtccgtgacgccgtggagttcggtagtcccggagaaaagcccgtttgttgaactgttcgtgttggtagggctgcctgctgccgcaagcgtgatcaactttgtggtgctgacctctgcggcgtcttccgctaacagcggcgtcttctctaccagccgtatgctgtttggtctggcgcaggaaggtgtggcaccgaaagcgttcgctaaactttctaagcgcgcagtacccgcgaaagggctgacgttctcgtgtatctgtctgctcggcggcgtggtgatgttgtatgtgaatcctagtgtgattggcgcgttcacgatgattacaaccgtttccgcgattctgtttatgttcgtctggacgattatcctttgctcgtaccttgtgtatcgcaaacagcgtcctcatctacatgagaagtcgatctacaagatgccgctcggcaagctgatgtgctgggtatgtatggcgttctttgtgttcgtggtcgtgttgctgacactggaagatgacactcgccaggcgctgctggttaccccgctgtggtttatcgcgctggggttgggctggctgtttattggtaagaagcgggctgctgaactgcggaaataaccgcattatcatgctggatggcgcaatgccatccagcttttagatcactcacccgccagcgcgcgtgggaacagtacattgttttccagactgatgtgatccatcaggtcatcaatcagttcattaatgccgttatacatcgctttccaggtggtgcaggcttctggcggcggtgtgacgttattggtggtgtgtttaatcacttccagcagttcgcccgcttcatcgtgctcgctttccattacgctgattggccccattgcctggctgcccatgccttgtttgatcatcgggaagaggatctgctcttctttcatcatgtggctggaaagctcttcatgcagcatggtcaggtattttgtcagcccttttggcacgctcggtttgtcggcgtgaacgcgctcgactttagtcgcttgcagaatcagctccggcagttgctcgcggtgacgatcgtggtagcgcacgatgatatggtcgatgatttctgccagcggggcgctacgccagtctttctcaatcggttgttcagcgagctttgccagttcagcttcaatgacctcaacatccagttctttacgtgccgccgcgcgcgccagcgtctgcttaccgccacagcagtaatccatatcatatttacgaaacagagctgaagcgcgaggaatagagagcgccagttcacctaaaggttggtcgcgataagccatagctgatacctcattcttaataagataagatgtattttaaatgcatctttaaggcaaaagctataacccttacgtagcagaggcttatttaactcactgccagcgtgtcaactttctgagacagattcagttaaaggtttttctggttttgctctgaccgcgatgaccacgccaatcactaacagcgcgataccgctcagcgtcattagcggcggcatttgctggcggagtaaaaaggtgtacagcaaacctgccagcgtttcgaaaacaatcagcggcccgagaatcactgtcggtaatagctggctggcgacgttccagcagagtgcgccaacccatgagcaaagcacggctatcgcaaccatcagactaataaacaccagcggacgggggccaaagggtagggagaagtccggcgtttgcgtattcagccagtaacaagcgacgagatagccgataagtgaaaccggcagtgtgaccagcgcctgcgctgttgcccacatcatcggatgtttgtcgggattttcccgcagccagcgggcgttgcgcagggcataccacgcccagcagaccacggaaactaacgccagcacgatgccagaggtataacgtgcccagtcaaaatcggggagtccgtggtttaactcagcaatattcacacacgccaggccgatgccaatacaaatcagtgctggggcgagttttccccacgcgagtttgccgtcgcgctggctataaagcagattggcaaagacaggaatgaccaccggcagggtgccgataatcatcgtggaaacaggcgcgccagtacgttgaatggcactggcaaggcagaagtaatagatgaggttgcccatcatagtgagcatcaaggcggtaagccagtcgcgacgcgccaactgacgcagacgcacgcgtcccagccaggcaatgggcagcgcaattaaccctaacgccagataacgccccatcgactgcaacatcgccgggtattccggcacgatcaacggcccgacaaaaataagcccccacatcaaccctgctaacagggcgtacagcacgccgctaatcattactggcatccattgatctgtcagaagaaagttcaggaagcagacatgattgctcccggcatcccgtcattatcagagaggatgcgggaggatgccactttaattaactagttattaacattaaaaagatggcttacgctttcggctaacgttgtcgttgggtggccaatcaatttgctaagtgttttgctgtcatcaaacagaccgcctttcgatgcgccaacgtcagaatccgccagcatatccgccagtccgtcgggcagtccgacgcttttcagtgccgcggcgaaatcggcttcgctcagattttgataggtaacctgtttgccgctctgtttggtcagctctgccgctaactgtgtcaacgtccaggcactatcgcccgccagttcgtaaaccttgccttcgtgaccggcttcgctaatcacgcgtgccgcagctgccgcataatctgcccgcgttgctgaggcgattttgccatcgcccgccgcaccgataaatacgccgtgttccagtgctgccggggcgctggcgaggtagttttcgctgtaccagccgttgcgcagcagggtgtaaacgatgccagaatcagccagcattttctccgtctcgatgtgctcatcggcgaggccgagcggggaggtatctgcatgtagcaggctggtataagcgataaatttcacgccagccgcctttgcggcattaataacattacgatgctgcggggcacgttgacccacttcgctggaagagatcagcagtagtttttccactccctgaagtgcagatgtcagtgcggcttcatcgccgtagtcagcctgacgcacggtaatgccttgtgctgccagggcttgggcttttgccggattacgaacgatagccactatttggctggcaggaaccgttttcatcaaggattcaataacatagtgaccaagttggccagtggcaccagtaatagcgatcatgggaagtctccatcgttttgtcttgtgtttaaatacgctaacacctaaacttacttttagtaagtacgtacaaaaaggtaagtatgaaatgagtcaggttagcctgtcgcaacaactgaaagagggtaatctctttgcggaacagtgcccgtcgcgcgaggtgttgaaacacgtcaccagccgttggggggtgttgattctggtggcgctacgcgaaggtactcatcgctttagcgacctgcggcgcaaaatcggtggggtgagtgaaaagatgcttgcgcagtcgttacaggcgttagaacaggatggttttcttaaccgtatcgcgtatccggtggtgccgccgcatgtggaatatagcctcacgccgctgggcgagcaggtgagcgaaaaggttgctgcactggcggactggattgagttgaatttgcccgaggtgttggcggtgcgggatgaacgtgcggcataactgccggatgcgctgagcttatctggtctacggtgcatggcttgtagggcggataagatgcgccagcatcgcatccgccaataaatgccggatgcggttgatgatttataggccgaaaaagaagtgttttacttactcaaatccacctgataaatcgcaaacccgatatcatcggtcgcgactttattcatcggatactgccctttctctttaataaacgctgcggctttatctgacggagaggtttcgaaacggatatccagtttcttatcgccagctatcggtgctaaacgccagttgttatctgccgccgggtgaatttcccccgcacgtttcgactcatcagcaatccacgctgccagcaccgagcggttctcatccggtgaagcaaaagcgatatggctgtcgcccgtaccggcaaatttgccgccgtaagcgcgatagttattggtggcaaccaggaacatggcgttcggatcaatcggcttgccattaaaggtcaggttcttaatcctttccgcattggcattaatcatctggcactcgccgtcataacgggcgggctgggtaacatcaatctgataattcacaccatcaataacatcaaagttataagtgcggaaaccatcccagttgatgagtgactgtggtttcgtgctgttgggatcaatctggttaaactgtcccgcggagcactccagccactctttcacctctttaccgctggctttcaccacaatcagcgtattgggatagagataaagatcggcggcattacggaaggtcaactggcctttttccacctccacatagcttgccgggtcatttttgcgaccaccgactttaaacggtgcggcagctgaaagcaccggcagttttgccagatccggatcgccctgaatgtaatgctcgacatacgctttttgcgcgttgttcaccacctgcacggtcggatcgtcctgcaccagcgccagatagctatacatattgtcggcagatttaccgattggcttgctgacgaactggcgtgtggcatcgtgatcggctttgagtgtttctaccagcttgctgtcttccgccgcgagggattttttattagcgatgtcgtaaatcggtcgtgcttccgctttcgcctgcgtcacctgccatttaccgctgtcattactgagttgtaagtcgaccacaccaagatgatcgccccacatgcctggcattaccgccggaacaccattcagcgtgcctttggcgatatcagccccttcgatatcagcaaaatctttacctgggaaaacggcgtgagcatggccaaacataatggcgttaacgcccggaatttcactgaggtaataaactgagttttccgccatcactttatacggatcggcagatagcccggaatgtgccagaacgacaacaacatcggcacctttctcgcgcatttcaggcacgtatttgcgcacggtttcggtaatatcattcaccgtcactttcccggataaattagctttatcccagcccatgatttgtggtggcacgacgccaatatagccaatcttcagcgtctgtttttttccgtctttatcgaccacttcggtgtctttaattaaatacggtgtaaacattggctgtttggttctggcgtcaatgacgttggcatttacataagggaatttcgctcctgccagcgcatttttcaggtaatccagaccgtagttaaactcgtggttgccaagcgttccgacggtatagtccagcgtatttaatgccttatagaccgggtgaatatcacctgcttttaatcctttcgccgacatgtaatcggccagcggactcccctgaatcaaatcgccgttatcaaccagtacgctgtttttcacttcattgcgggcatcgttaatcaggcttgccgtacgtaccagtccgaatttttccgtggcggtgtctttgtaataatcgaaatccatcatgttgctatgcagatcagtggtttccatgatacgcagatcgaccgtcgctgcattcacactggcggcaatcagcgtggccaggagcgttgcgctaaacttaatcatcagggacatccttttatcatcgggaatacgaaagaaaagggagaataaacgtcttacttatagaacagtgaagaatgccacaattttacgctttgaaaatgatgacactatcacagttggcgcattcattaacgatagggtataagtaaaacaataagttaacaccgctcacagagacgaggtggagaaatgttagatcaagtatgccagcttgcacggaatgcaggcgatgccattatgcaggtctacgacgggacgaaaccgatggacgtcgtcagcaaagcggacaattctccggtaacggcagcggatattgccgctcacaccgttatcatggacggtttacgtacgctgacaccggatgttccggtcctttctgaagaagatcctcccggttgggaagtccgtcagcactggcagcgttactggctggtagacccgctggatggtactaaagagtttattaaacgtaatggcgaattcaccgttaacattgcgctcattgaccatggcaaaccgattttaggcgtggtgtatgcgccggtaatgaacgtaatgtacagcgcggcagaaggcaaagcgtggaaagaagagtgcggtgtgcgcaagcagattcaggtccgcgatgcgcgcccgccgctggtggtgatcagccgttcccatgcggatgcggagctgaaagagtatctgcaacagcttggcgaacatcagaccacgtccatcggctcttcgctgaaattctgcctggtggcggaaggacaggcgcagctgtacccgcgcttcggaccaacgaatatttgggacaccgccgctggacatgctgtagctgcagctgccggagcgcacgttcacgactggcagggtaaaccgctggattacactccgcgtgagtcgttcctgaatccggggttcagagtgtctatttactaaattcagatggcagaaacagtgtatttcctgattctgccatcctgatttctcccaacctaaaaagttataaataaaaagagattgtatttaaagtgcaaaaattcaattgctaataagttacattttaataatgagcgttttttgatagtttacttctatagtgagatatttaatggcgacataaagtaaccaaataaaataaggttgtcatatgttacccaggatcagacacaataattttattggtgcggtggagttatttgtaaagtcttcgtatacaaaaacacattcaaacaatttttttaacaacatccatcatgcatttaagaaaaaagattggatttcgaattatgatagcctgttaactttgagggagttctttcgttgcgcaactcagattgataaaagtggttatcaggtgctttcatcaaaaaatgaaactgttcacgccatggataagtttcttatcagtttcagccttaaagataacggtgccgaatatacaatgacattgcgaggtagtggatttgaatacgaagaaatacccataacaataaatgaatataactcattcatggatttcaaaaaccgtgaatttccgttagaacaaaacagacgattgtatgcctgggatattctacagaaaaaacagtctgacataccgaaaaggattaaaggttatattcaccaggcgattggtgacgtgtctttaggttatgccttattggaggatatagtaagcaaattaaaacggggtaaatttgaactccaaataccaggaggtggaattaaagaatgcgatggatggtatatttacgaaaaaataattgatgataattttgccatagtcatagaatctttgggctttgcgcttaaaatctatggaggggatgaacgttttcgtaatggttcctctgttgttttggaggatgaagattactctcttatttataattttctggttaatgcaggttgccaacaagtcgaattagccgaacaagtggatgcgatagtaagtgcgaatctggccgcagatagcgatattaccaaagaaaagatttgcgagaaatataaatcgaccattgaggcgtttaaaaaagagcaactagcgttaccagtattagttcggcgtaagaactcagagacttaattcccctatcccatagataacgataggggaaaattatttttgcagaatttatgttattgccattatttgagcaacttttgcagcaggtccatcacttgctgcacctcttccggtgtgagcgccccgtctttggcccattgcacgcgaccatccttatccagcaccactacagcggaactttcttcatccagctgccaggcaccgagcgcgacgccattgctatcgacaataaactgcgaccagggataaagctttttattactctccagactgctgcgcacaaacatccctgaacccggaatcgcgtcgtcggtgttaacaatggtggtggtctggtaacgatcgtgcggtaacttcgctgatttaatcgcttcaatcagcgtcgcgtttttctcttttgcagaggtgcgaccagcaatatgttgcagtactcgcacttttcccactaactgcgcgctgttccaggttttgtagctaaactgatctttatcaagcaccaactcgccccgatcggtaatgccaatcggcggcactcgctgaccggtttcgaactgatgtgcggaagccatcatcggcaacagcaggcaggtgagtgccagaatcttgcgtagggtcatggtgtttccttcttatgatatgcaggtgatccgaccacttgggtctgagttttaatcatatgtgctatttatcgaatttcccgcaagtgtgatgccagtttgcggtcaagcgcacaaatcatatgaaaaatgaatgcttatactgaagaccgcgcttcggtaaaaagataattctgaataattgtaacctttaggtaaaaaaagttatacgcggtggaaacattgcccggatagtctatagtcactaagcattaaaatttgcgcctcataatagttgggccgattgtggcaccgcacaggcgtaatactcagcaggagataacaatgaaaattttccaacggtacaacccacttcaggtggcgaagtacgtaaagatcctgttccgtggacggttatacatcaaggacgttggcgcttttgaattcgataagggtaagattcttatcccaaaagtgaaggataagctgcatttgtcagtgatgtccgaagttaaccgtcaggttatgcgtctgcaaacagagatggcttaaccaaagtgctatgcagtaaaaagtgctatgcagtaataagacggctcctgattcaggagccgttgatgtttctgggggttacgcgacgctttcttctttatctttagcgtcaggcagttttggcgaaagggcggtggccttgctgtcgatccgggtcaccagcagctggtcgatgcggtagttatcgatatccaccacttcaaatttgtagccggcgaatttcaccgaatcggtgcgtttcgggatcttacgcagcataaacatcataaagccgccgatggtttcgtagttgcccgactgcgggaactcgtcaatatccagcacgcgcatgacgtcgtcaattggggtgccgccgtcaatcagccatgagttctcatcacgggcgacaatctgctcttccagcccctgaccgaccagatcgcccatcagcgtggtcatcacgtcattgagggtgatgatccccaccaccagcgcgtactcgttcatgatcaccgcgaagtcttcacctgcggttttaaaactttccaacgcctctgaaagggttaacgtatccggcacaatcagcgtgttgcgaatttgtacgccgctgttcagtgccaggctttggttagccagcacgcggttcagcaggtctttagaatcgacataaccgatgatgtggtcaatatcttcattacagacgaggaacttagagtgcggatgttccgccaccttattcttcaggctttgctcatcttcgtggagatcaaaccaaatcacgttttcacgcggtgtcattgaagacggaacggtacgggattccagctcaaagacgttttcaatcagctcgtgttcctgtttacgtaacacgcccgccagcgcaccggcttccactaccgcgtagatgtcatcagaagtgatgtcatctttacgtaccattggcagtttgaaaatacggaagattatgttcgccaggccgttgaagaaccacaccagcggggtgcaaacgtacaggcagaagcgcatcgggttgatgatacgcaaagccacagcttctggcgcaatcataccgatgcgtttcggggttaaatccgcaaacaggataaacatgccagtcactaacgagaaagagagaataaagctcagttgctcagagagctctgccgacatatagcgggagaacaggctgtgaaaagctggagaaaatgccgcatcaccgacgataccgccgagaatcgccactgcgttcagaccgatttggaccacggtaaagaacatgccgggattttcctgcatattcagaacgcgttgggcatttatattgccttcatcagccagcagtttaagtttgattttgcgtgaggcggcaagcgagatctcggacatcgagaagaacgcacttacagcgatcaagcagagtatgactaaaatactgtttaacatatcttatccgacctttcaggccagatcctcggaaggggaagttgattaatttgtgtgaaatacacattgaaagccgattcgaagaaagtgaaccggcattttcagtggctagtatagcgtaaggtactgtaaagccgccagagggttaaaattcagacagctgaaaaatgcaaaactgcctgatacgctatgccgatcaggcctacgcagtccttgcaatatattgaatttggacgattttgtaggcctggtaagtcgtttacgccgcatcaggcatagacaaagagcactttatcaacaaactacatttgtacccgtaacgctatgcttccggcggcagacagacgccaattccgccaattccacagtaaccatacgggtttttatgcagatattgctggtggtcatcttcggcataataaaacggtgtggcgttagcgatttccgtggtgatgtgacgatcgtcatcggcggcaagcatcgccgcctgaaaacgttccagactggcgcgagctgcggcatcctgttctggggtcagcggataaatcgctgaacgatactgcgtgccgtggtcattgccctgacgcattccctgggcgggatcgtgattctcccaaaatacctgtagcaactgctcatagctgatgacggaaggatcgtaaacaatgcgtaccgcttcggcatgacccgtatcaccggagcacacttcccgataagtcggatttggcgtatagccgccggtatagcctgcggcggtgctgtaaacgccgggtaactgccagaacagacgctccacaccccagaaacaacccatcgcaaaaatggcaatctccattccgtcaggtacattggtcattgagtgaccgttgaccgcatgcagcgtggctacgggcatcggggtgttacgtccaggcagggcatcggcgggggaaaccagatgctttttatcaaataaactcatggtgtcgctctcccgaaaatcggtcattggggttaaggttgtaacaagaggcgtatttgcacacaataaccaccgtgaataggtctaaagtaaaacataagaaatatttggggtttagtctgctttttaatccatattactggatttttgttaagccgtttaacggcgttccaggggcaggaaaaaaggatattcaggagaaaatgtgcgctatatccgacagttatgctgtgtaagcttactctgcttaagcggatctgccgtcgccgcgaacgtccgtctacaggtcgaggggttatcgggacagctggaaaagaacgttcgtgcgcagctttctacgattgaaagtgatgaagtgacgccagaccgtcgctttcgcgcacgcgtcgatgatgccatccgcgaaggtctgaaagcgctgggttattaccagccgaccattgaatttgatctccgtccaccgccaaagaaagggcggcaggtattgatcgccaaagtcacgccaggcgtgccggtgttaattggcggcaccgatgtggtattgcgcggcggcgcgcggaccgataaagactatttgaaattgctcgatactcgcccggctattggcacggtactgaaccagggcgattatgaaaatttcaaaaagtccttaaccagcattgcgttgcgtaaaggttatttcgatagcgaatttaccaaagcgcagctgggcattgcgctcggcctgcataaagccttctgggatattgattataacagtggcgaacgttaccgctttgggcatgtgacctttgaaggatcacaaatccgcgatgaatacctgcaaaatctggtgccgtttaaagagggcgatgagtacgaatcgaaagatctggcagaactgaaccgccgactttctgctaccggctggtttaactcggtggtggtggctccacaatttgataaagcgcgcgaaacgaaagtattaccattgacgggcgtggtttcgccgcgaacagaaaacaccatcgaaaccggggtcggttactctacggacgtgggaccgcgcgtgaaagcgacgtggaaaaagccgtggatgaactcttatggtcacagtctgaccaccagtactagtatttccgcgccggaacagaccctcgacttcagctataaaatgccgctgctgaagaatccactggaacaatattatttggtgcagggcggttttaagcgcactgacctgaacgataccgaatctgactccactacgctggtggcttctcgctactgggatctctccagcggctggcagcgtgccattaacctgcgctggagtctcgaccactttactcagggtgaaattaccaataccacgatgctgttttatcctggggtgatgattagccgcacgcgttctcgtggtggcctgatgccaacctggggcgactcgcaacgctactctatcgactactccaacacggcctggggttcagatgtcgatttctccgttttccaggcgcagaacgtctggatccgcacactgtacgatcgccatcgttttgttacacgcggcacgctgggctggattgaaaccggtgatttcgacaaagtaccgccggatctgcgtttcttcgccgggggcgaccgcagtattcgtggctacaaatacaaatctatcgctccgaaatacgccaacggtgacctgaaaggggcctcgaagttgataaccggatcgctggaataccagtacaacgtgaccggaaaatggtggggcgcggtgtttgtcgatagtggcgaagcggtaagcgatattcgccgcagcgactttaaaaccggtaccggggtcggcgtgcgctgggaatcgccggtcgggccaatcaaactcgattttgccgtaccggtcgcggataaagacgaacacgggttacagttttacatcggtctggggccagaattatgagtttatggaaaaaaatcagcctcggcgtggttatcgttatcttactgttgctgggatcggtggcgtttctggtgggcaccaccagcggcctgcatctggtatttaaagcggcggatcgctgggtgccaggactggatattggcaaggtcaccggcggctggcgcgatctcaccttgtctgacgttcgttatgagcagccaggcgtggcggtaaaagcgggcaatctgcatctggctgtcgggcttgagtgcctgtggaacagcagtgtttgtattaatgatctggcgctgaaagacattcaggtcaacatcgacagtaaaaaaatgcctccttctgaacaggttgaagaagaggaagatagcggtccgctggatctctccacgccgtatcccatcaccctgacacgggtggcactggacaacgtcaacattaagattgatgacaccacggtatcggtgatggacttcacctccggcctgaactggcaggagaaaaccctgaccctgaaaccgacgtcgctgaaaggcctgctgattgctctgccgaaagtggcggaagtggcgcaggaagaagtggtcgaaccgaaaattgaaaatccgcagccggatgaaaagccgctcggcgaaacgctgaaagatctcttttctcgcccggtattgccggaaatgaccgacgtgcatttgccgcttaacctgaacattgaagagtttaagggcgagcagctgcgcgtgacgggcgacacggacatcaccgtgagcaccatgctgctgaaagtgagcagcattgacggcaatactaaactggacgccctggatatcgattccagtcaagggatcgtcaacgccagcggcacggcgcagctgtcagacaactggccggtggacatcactctcaacagtacactgaacgtggagccgttgaaaggtgaaaaagtgaagctgaaaatgggcggcgcgctgcgcgaacagctggagattggcgttaatctttccggtccggtggatatggatttacgcgcccagacgcgactggcggaagccggattgccgctcaacgtggaagtgaacagcaaacagctttactggccgttcactggtgagaagcagtatcaggcggatgatctgaaactgaaacttaccggcaaaatgaccgattacacgctctctatgcgtacggcagtgaagggacaggagatcccgcccgcgactattaccctcgacgccaaaggtaatgaacagcaggtcaatctcgacaaactcaccgtcgcggcgctggaagggaaaactgaactcaaggcgttgctcgactggcaacaggccattagttggcgcggtgagctaacgcttaacggcattaacaccgccaaagagttcccggactggccgtcgaaactcaatggcttgattaaaacccgcggtagcctgtacggcggcacctggcagatggacgtgccggagttgaagctgaccggtaacgttaaacagaacaaagtgaacgttgacggcacgctgaaaggcaacagttatatgcagtggatgatcccagggcttcatctggaactcgggccaaacagtgccgaagtgaaaggcgagctgggggtaaaagatctcaatcttgatgccaccatcaacgcgccggggctggataacgcgctgccggggcttggcggtacagcgaaagggctggtgaaagtacgcggcacggtggaagcgccacaactactggcagatatcaccgcgcgcggcctgcgctggcaggaactttccgtggcgcaggttcgcgtggaaggcgatatcaaatccaccgatcagatcgccgggaaactcgacgtacgcgttgagcaaatttcgcagccggatgtaaatatcaacctcgtcaccctgaatgccaaaggcagcgaaaagcagcacgagctacagttgcggattcagggggagcctgtctccgggcagcttaatctggcaggaagttttgatcgcaaagaagaacgctggaagggaactcttagcaatacccgcttccagacgccggttggcccgtggtcgctgacccgcgatattgcgctggattaccgcaataaggagcaaaaaatcagcatcgggccacactgctggcttaacccgaatgcggaactgtgcgtgccgcaaactatcgatgcgggggccgaagggcgtgcggtggtgaatctcaaccgcttcgacctcgccatgctgaaaccgtttatgccagaaaccactcaggccagcggtatcttcacgggtaaagcggacgttgcctgggacaccacgaaagaggggctgccgcagggcagtatcaccctttcggggcgtaacgtgcaggtaacgcaaaccgtcaacgatgcggcgctgcccgtggcgtttcagacactgaatctgacggcggaattgcgtaacaaccgtgccgaattgggctggaccatccgcctgaccaataacggccagtttgatggacaggtgcaggtgaccgatccgcaaggccgccgtaatcttggtggcaacgtcaatatccgtaacttcaaccttgcgatgataaaccccatctttacccgtggggaaaaagcagcggggatggtgagtgccaacttgcgtctgggtggtgatgtgcaaagcccgcagttgtttggtcagcttcaggttacgggtgtggatatcgatggcaactttatgccgtttgatatgcaaccgagccagcttgcggtcaactttaacggtatgcgctcgacgcttgccggtacagtacggacccagcagggtgaaatctacctgaacggtgatgccgactggagccaaattgaaaactggcgggcgcgggtaacggcgaaaggcagtaaagtgcggatcaccgtgccgccgatggtacgaatggatgtatcgccagatgttgtattcgaggctacaccaaacctgtttaccctcgatggtcgcgtggatgtcccttgggcgcgcatcgtggtgcacgatctgccggaaagcgcagtaggcgtctccagcgatgtggtgatgcttaacgataacctgcaaccggaagagccgaaaacggcgtcgattccgattaacagtaacctgattgtccacgttggcaacaatgtgcgcattgacgcctttggcctgaaagcgcggctgacgggcgatctcaatgtcgttcaggacaaacaagggctgggtctgaacgggcagatcaacatccctgaagggcgcttccatgcctatggtcaggatctgattgtgcgtaaaggtgagttactgttctctggtccgccagatcaaccgtatcttaatattgaagctattcgtaacccggatgctacagaagacgacgtaatcgccggagttcgcgtcactggtctggcggacgaaccgaaagcggagatcttctctgacccggcgatgtcgcaacaagctgccttgtcttatttgctacgtggacaagggctggagagcgatcagagcgacagtgcggcaatgacctcgatgctgattggtttgggggttgcgcaaagtggccagattgtgggtaaaatcggcgagacgtttggcgtaagcaatttagcgctcgacacccagggagtaggcgactcctcccaggtagtggtcagcggctatgtattgccaggtctgcaagtgaaatacggcgtgggtatatttgactctatagcaacactcacgttacgttatcgcctgatgcctaagctatatctggaagccgtgtctggtgtagaccaggcactggatttgctctatcagttcgagttttagcaatgcgaatatttgtctacggcagtttacgccacaaacaaggcaacagtcactggatgaccaatgcccagttactgggcgatttcagtatcgataactaccagttgtatagcctgggccactatccaggcgcagttccggggaacggaacggtacacggtgaagtttatcgtattgacaacgccacgctggccgaacttgatgccttgcgcaccaggggcggtgaatacgcgcgccagttgattcagacgccgtacgggagtgcatggatgtacgtttatcaacgacccgtcgatggattaaagctaattgaaagcggcgactggttagacagggataagtaaccatatgcatacgccaccttcgggtggcgttgttttttgcgagacgactcgcattctgttttgtaattccctcaccttttgcttttctctccgagccgctttccatatctattaacgcataaaaaactctgctggcattcacaaatgcgcaggggtaaaacgtttcctgtagcaccgtgagttatactttgtataacttaaggaggtgcagatgcgtattaccataaaaagatgggggaacagtgcaggtatggtcattcccaatatcgtaatgaaagaacttaacttacagccggggcagagcgtggaggcgcaagtgagcaacaatcaactgattctgacacccatctccaggcgctactcgcttgatgaactgctggcacagtgtgacatgaacgccgcggaacttagcgagcaggatgtctggggtaaatccacccctgcgggtgacgaaatatggtaaagaaaagtgaatttgaacggggagacattgtgctggttggctttgatccagcaagcggccatgaacagcaaggtgctggtcgacctgcgcttgtgctctccgttcaagcctttaatcaactgggaatgacgctggtggcccccattacgcagggcggaaattttgcccgttatgccggatttagcgttcctttacattgcgaagaaggcgatgtgcacggcgtggtgctggtgaatcaggtgcggatgatggatctacacgcccggctggcaaagcgtattggtctggctgcggatgaggtggtggaagaggcgttattacgcttgcaggcggtggtggaataaggtgtgtttatttatcgcgggcataaaaaaacccttactaaccgaagcccggcgttcagggttattacgccagaagaacttatttattctttgcgcgctcgaaggaggcaacgatttcagctttagcggcttctgcgttttcccaaccttcaactttcacccacttgcctttttcgaggtctttgtagtgctcgaagaagtgagcgatttgcgctttcagcagttcaggcagatcgttaacgtctttaatgtgatcgtattctttgctcagcttgctgtgcggaaccgcaaccagtttcgcatcttcaccggcttcgtcggtcattttcagaacgccaaccggacggcaacggatcacagaacccggctgcagcgggtacggagttgggaccagtacgtcaaccgggtcaccgtccagagacagggtgtggttgatgtaaccgtagttgcatggatagaacatcgcggtggacatgaagcggtcaacgaacagtgcgccgctctctttgtcgatttcgtatttgatcggatctgcgttagccgggatctcaataacaacgtagatgtcttccggcagatctttacccgcagggacgttgagtaagctcatgtctgtttcctttaaaaatatgtggcaaacaagtgccgagtattatagccaactcgcgccgaatgtcttcgcttgttttcgtcttcattttcctttttcaccagttttaagacggtatacagagcaggaaaatccataaccgtagccgcatttttcatagtgagatgaaagcgattacaaacttgtgattaacgttttatttacttttttgaagtgtgatgtaacgcaatctgttacataacgaattgtctatagttttttcgcgaacatcttttaaccaataataactaccccgacgaggacaaccctatgtggaaacgcttacttatagtctctgcagtctcggcagccatgtcgtctatggcgttggccgctccattaaccgttggattttcgcaggtcggatcggaatcaggctggcgtgccgcagaaaccaatgtggcgaaaagtgaagccgaaaagcgcggaatcacgttgaaaattgccgatggtcagcaaaagcaggaaaaccagattaaagcggtacgttccttcgttgcacaaggggtggatgcgatctttatcgctccggtggtcgcgacaggttgggaaccggtattaaaagaggcgaaagatgccgaaatcccggtattcttgctcgatcgttccattgatgtgaaagacaaatctctctatatgaccaccgtcactgccgacaacatcctcgaaggcaagttgattggtgactggctggtaaaagaagtgaatggcaaaccatgcaacgtggtggagctgcagggcaccgttggggccagcgtcgccattgaccgtaagaaaggctttgccgaagccattaagaatgcgccaaatatcaaaatcatccgctcgcagtcaggtgacttcacccgcagtaaaggcaaagaagtcatggagagctttatcaaagcggaaaacaacggcaaaaacatctgcatggtttacgcccataacgacgacatggtgattggtgcaattcaggcaattaaagaagcgggcctgaaaccgggcaaagatatcctcacgggttccattgacggtgtaccggacatctacaaagcgatgatggatggcgaagcgaacgccagtgttgaactgacgccgaatatggcaggtcccgccttcgacgcgctggagaaatacaaaaaagacggcaccatgcctgaaaagctgacgttaaccaaatccaccctttacctgcctgataccgcaaaagaagaattagagaagaagaaaaatatggggtattgagggttgctatgcctgatgccgattcgtaggccggataaggcgctcgcgccgcatccggcgatggtgcactgaagcctgatgcgacgcttaccgcgtcttatcatgcctactgggagcacgctttacaccgggggaaaccatgacgaccgaccaacaccaggagatcctccgcaccgaaggattaagtaaatttttccccggcgtcaaagcgttagacaacgttgatttcagcctgcgccgtggcgaaatcatggcgctgctcggtgaaaacggggcgggaaaatcaacgctaatcaaagcattaactggtgtataccacgccgatcgcggcaccatctggctggaaggccaggctatctcaccgaaaaataccgcccacgcgcaacaactcggcattggcaccgtctatcaggaagtcaacctgctacccaatatgtcggtcgctgataatctatttataggccgcgaacccaaacgcttcggccttctacgccgcaaagagatggaaaagcgcgccaccgaactgatggcatcttacggtttctccctcgacgtgcgcgaaccgctcaaccgcttttcagtcgcgatgcagcaaatcgtcgctatttgtcgggctatcgatctctctgccaaagtgctgatcctcgatgaacccaccgccagtctcgacacccaggaagtggagttactgtttgacctgatgcgtcagttgcgcgatcgcggcgtcagcctgatttttgtcactcactttctcgatcaggtctatcaggtcagcgatcggatcaccgtcttacgcaacggcagtttcgtaggctgtcgggaaacgtgcgagctaccgcagatcgaactggtaaaaatgatgctggggcgcgagctggatacccacgcgctacagcgtgccgggcgaacattgttgagcgacaaacccgttgccgcgttcaaaaattacggcaaaaaaggaacgatcgcaccgtttgatctcgaagtacgccccggcgagatcgtcggtctggctggattgctgggatcaggacgtaccgaaaccgccgaagtgatcttcggtatcaaacctgctgacagcggcacggcgttgatcaaaggcaaaccgcaaaacctgcgatcgccacatcaggcttcggtactgggcattggcttctgcccggaagacaggaaaaccgatggcatcatcgctgccgcctcggtgcgggaaaatatcatcctcgctctccaggcccagcgcggctggctacgtcccatttcccgcaaagaacagcaagagattgccgaacgctttatccgccagcttggcattcgcacaccttcaactgaacaaccgattgaatttctctccggcggcaatcagcaaaaagtgttgctttcacgttggctactgacccgaccgcaatttctgatcctcgatgagccaacccgcggcattgatgttggtgcccacgccgagatcatccgcctgattgaaacgctatgcgccgatggtctggcgctgctggtgatctcctccgaactggaagagctggtgggctatgccgatcgggtgattatcatgcgcgatcgcaaacaggtggcggagatcccgctggcagagctttccgttccggcgatcatgaacgccattgcggcgtaaggagaacagtgtgatgcctcaatctcttccggacaccactacgccaaaaaggcgctttcgctggccgacggggatgccgcagctggtagcactattgctggtgctgctggtcgatagcctggtagccccgcatttctggcaggtggtgcttcaggatgggcgtttgttcggtagccccatagacattcttaaccgtgcagctcccgttgcgttactggcgattggcatgacgctggtgatcgccaccggtgggattgatctctccgtaggggcggtgatggctatcgccggagccacaacggctgcgatgacggtcgcgggattcagcctgccgattgttttgttaagcgccctgggcaccggcatcctggcgggattgtggaacggcatactggtagcgatcctcaaaattcagccgtttgtcgccactctgatcctgatggtcgccgggcgcggcgtggcgcaactgatcaccgccgggcagatcgtcacgtttaactcgccggatctctcatggttcggcagtggatcgctgttgttcctgccaacgccggtcattatcgcggtgctgacgcttatcctgttctggctgttgacccgcaaaacggcgctggggatgtttatcgaagccgttggtatcaacattcgggcggcaaaaaatgccggggtaaacacgcgaatcatcgtcatgctcacttatgtgttgagcgggctgtgtgcggcgattgcgggcattatcgtggcggcggatattcgcggtgccgatgccaacaacgctgggttatggctggagctggacgccattctcgcggtggtgattggcggcggatcgctgatgggcgggcgctttaacctgctactttcggtggtgggggcgctgattattcaggggatgaacaccggaattttgctttcgggctttccgccagagatgaaccaggtggtgaaagcggtggtggtgctttgcgtgctgattgttcagtcgcaacgctttatcagtctgattaaaggagtacgtagccgtgataaaacgtaatttgccactgatgatcaccatcggcgtctttgtgttgggttatctttactgcctgacccagtttcccggttttgcttccacaagagtgatctgcaatatcctgaccgataatgcctttcttgggatcattgccgttggcatgacctttgtgatcctctcaggtgggatcgatctctccgtcggttcggtgatcgcctttactggcgtgtttctggcaaaagtgattggcgatttcggcctctcgccgctgctggcgtttccgctagtgctggtgatgggctgtgccttcggcgcatttatggggcttctgatcgacgccctgaagatcccggcatttatcattacgcttgcggggatgttctttttgcgcggcgtcagctatctcgtttcggaagagtcgattccgataaaccatcccatttatgacacgctctcaagccttgcgtggaaaatccctggcggcggtcgcttaagtgcgatgggactgctgatgttggcggtggtggttatcggcatattcctcgcgcatcgtacccgttttggtaatcaggtatacgccattggcggcaacgcaacgtcggcgaatctgatggggatttccactcgcagcaccactattcgcatttatatgctctccaccggactggcaacgctggcggggattgtcttctcgatttatacccaggccggatatgcgctggcgggcgtaggtgtggaactggatgctatcgcctcagtggtaattggcggtacgcttttgagcggtggcgttggaacggtattagggacgctttttggcgtggcgattcagggactgattcagacttacataaactttgatggcacgctgagttcctggtggacgaaaatcgccatcggtattttgttgtttatttttatagcattacagcgtggattaacggtgctgtgggagaatcgtcagagttcgccagtgacaagagtcaacattgcgcagcaataaaaacgcctctccgtgtggagaggcgcaggagattacgcgtccgggaactcacggataaagcgttcgacatcttcaaccatatggtcgttgccgacaaagaatgaacggcgctggtgcagggtttccgggatgatatccagaatacgctctttgccatcgctcgctttaccgcccgcttgttccgccaggaatgccatcgggttgcactcatacagcaaacgcagtttgccgtccgggtggctggcggtgcttgggtagagataaataccgcctttcagcaggttacggtggaaatccgcgaccagtgaaccgatataacgtgaggtataagggcggttggtggatttatcttcttcctggcagaatttaatgtacttcttcaccccgttcggaaacttaatgtagtttccttcgttgatggagtaggttttgcctttctccgggaagcgcatccgttcctggcacaggcagaaaacgccgagcgaaggatcgtaagtaaaggcgtgaacaccgcatccggtggtgtaaaccagcatggtagaggagccgtataccacgtaacctgccgcaacctgtttgttaccaggctggaggaaatcttcttccgttaccggcgtgccaacaggcgtaacgcggcggtagatggagaaaatggtaccgacagagacgttaacatcgatgttggacgagccatccagggggtccatcagcaccacgtattttgcgtgttcacagccttcaaagacgacaatctcatcttcttcttcagaggcaatgcccgcaacgatatcgcgtgctttcagtgcggctttcagtttttcattagcgaacaagtcgagtttctgctgaacctcgccctgcacgttctcagcaccgctggcacccaggatatcaaccagtcctgctttgttgatatcgcgatggataatcttggcgcccagttttattgccgacagcaaagcagtgagctcaccggtagcatgagaaaactcgtgctgcttttcgacaataaattcacctaacgttttcataaaactttccctgcaatgtttatggagtaaagcgaccgcaacaatcttaacaaataatctcaatgttgcgctcaggtgaatcgcgccagcaaattacggattatcctgaaatgcgtttctcacttgcccgacatatgcgtaaaatgagcggcagattaaaaaaggatagtgacgtatgcgcattcatattttaggaatttgtggcacatttatgggcggtctggcgatgctggcgcgccagttaggccatgaagtaacgggttcggacgccaatgtgtatccgccgatgagcaccttacttgagaagcaaggcattgagctgattcaggggtacgatgccagccagctcgagccgcagccggatctggtgattattggcaacgccatgacccgtggaaatccgtgtgtggaagcggtactggaaaaaaatatcccttatatgtcaggtccacagtggctgcacgattttgtgctgcgcgaccgctgggtgctggccgttgccggtacacacggcaaaaccaccaccgcgggaatggcgacctggattctggaacagtgtggttacaaaccgggctttgtaatcggcggtgtgccggggaactttgaggtttcggctcatctgggcgaaagcgacttctttgttatcgaagcggatgagtatgactgcgccttcttcgacaaacgctctaaatttgttcattactgcccgcgtacgctgatcctcaacaaccttgagttcgatcacgccgatatctttgacgacctgaaagcgatccagaaacagttccaccatctggtgcgtatcgttccggggcagggccgtattatctggccggaaaatgacatcaacctgaaacagaccatggcgatgggctgctggagcgagcaggagctggtgggtgagcagggtcactggcaggcgaaaaagctgaccaccgatgcttccgaatgggaagttttgctggatggcgaaaaagtgggcgaagtgaaatggtcgctggtaggcgaacataatatgcacaatggcctgatggcgattgcagcggctcgccatgttggtgtagcgccggcagatgccgctaacgcgctgggttcgtttattaatgctcgtcgccgtctggagttgcgtggtgaagcgaatggcgtcacggtatatgacgattttgcccatcacccgacggcgattctggcaacgctggcggcgctgcgtggcaaagttggtggtacggcgcgcattattgctgtgctggagccgcgctcgaataccatgaaaatggggatctgcaaagacgatctggcaccttcattaggtcgtgccgatgaagtcttcctgctgcaaccggcgcatattccgtggcaggtggcagaagtggcagaagcctgcgttcagcctgcacactggagtggcgatgtggatacgctggcagatatggtggtgaaaaccgctcagcctggcgaccatattctggtgatgagcaacggcggttttggtgggatccatcagaaactgctggatgggctggcgaagaaggcggaagccgcgcagtaattcggccttagccagatatagtatgcgtaggccggataaggcgttcacgccgcatccggcatttgagcatagtgcctgatgcgacgcttgatgcgtcttatcaggcctacaggtgcaccgtatccggcaaaccatactcacatcaacaacgaaaattacccttcgttctccgctaactcgcgcagatactggaaaatctggcgtgcggatttcggcggcttattcccttctttctctttcttcgcgttgcggatcagagtacgcagttgctgacgatcggcatcgggccacagatttaatacctcagcgatggcgtcatcaccttgatcgatcagacgatcgcgcaggttttccagtttatggaacagcaccacctgctggttgtgacggtttttcagcttatccagcgcctgacgaataggctctacgtcgcgctggcgcagcatcttaccgatgagctgcaactggcggcggcgaccttccatcttaatacgctgggcgagctcaatagccgcgcgcagatccgcatctaacgggatcttatccagcgcgtttttccccagatcaacaatttccgcgccaaggcgttttagctcctcggcatcacgtttaatttcacttttactgacccagataatttcatcgtcttcgtcttcgatgtcatcaccgggaacgtcgtcgagccagtcttcgggctgcttagtcatctcaggctccttaaaaaaagaggctaatgttaccagttaagatgcgcactgaaaaacggttctctgttagacttcagagaaactctctacattatggcacttgcaatgaaagtaatctctcaagttgaagcgcagcgcaagattctggaagaagcagtttccactgcgctggagttggcctcaggcaaatcggacggtgcggaagttgccgtcagcaagaccaccggcattagcgtaagcacgcgttatggtgaagtggagaatgttgaattcaatagcgatggcgcgctggggatcactgtttatcaccagaaccgcaaaggtagcgcatcatccaccgatttaagcccgcaggccattgcccgtactgtacaggcggcgctggatattgcccgttatacctcgccagatccctgtgccggcgtggcagacaaagagctgctggcctttgacgcaccagatctcgacttgttccaccctgcggaagtttccccggatgaagccattgaactggcggcccgcgcagaacaggcggcattgcaggcggacaaacgcatcaccaataccgaaggtggcagctttaacagccactacggtgtcaaagtttttggcaacagccacggcatgttgcagggttactgctcaacgcgtcattcgctctccagctgtgtaattgccgaagaaaatggcgatatggagcgtgattacgcctacaccattggtcgtgcgatgagcgatctgcaaacgccagagtgggttggggccgactgtgctcgccgtactttatcgcgtctgtcaccgcgtaaactctccaccatgaaagcgccagtcatttttgccaatgaagtggcaaccgggctttttgggcatctggtgggggcgatagcgggtggatcggtttatcgtaaatctaccttcctgctggattcgctgggtaaacaaattctgccggactggctgaccattgaagagcatccgcatctgctgaaagggctggcgtcgacgccattcgacagcgaaggtgtgcgcaccgagcgtcgcgatattattaaagatggcatcctgactcagtggctgctgaccagctactcggcgcggaaactggggctgaaaagcaccggacatgcgggcggtattcacaactggcggattgccggacaaggtctaagcttcgagcagatgctcaaagagatgggcaccgggctggtggtgacggaattgatgggccagggcgtgagtgccattaccggtgattattcccgtggtgcagcgggcttctgggtagagaatggcgaaattcagtatccggtgagcgaaatcaccatcgcaggtaatttaaaagatatgtggcgcaatattgtcaccgtcggtaacgatattgaaacacgcagtaatatacagtgtggttctgtgctgttgccggagatgaaaatcgccggacagtaaaaaaactggcgcgacctgccgcgctataaactaaaaaattacacaaaatcattcgcactgcatcgagacggaaagtgaatgagggccggggagcgtactcgcagtacgtgacccggtcgaatgagcgtagtcgtcgatgaggcagtgtgaaggatgaagtgtaaataaaaaaggaactattcttgcagtctcctcgttggtattcagttcggcgtcatttgctgctgatctcgaagacaatatggaaaccctcaacgacaatttaaaagtggtcgaaaaagccgataacgcggcgcaagtcaaagacgcgttaacgaagatgcgcgccgcagcgctggatgcgcaaaaagcaacgccgccgaagctcgaagataaatcaccggacagcccggaaatgaaagatttccgccacggtttcgacattctggtcggtcagattgacgacgcgctgaagctggcaaatgaaggtaaagtaaaagaagcgcaggctgctgcagagcaactgaaaacgacccgcaattcatatcacaagaagtatcgttaattcctcatttccctgttgcctgcactcaggtaacagggaacttatcatcgcaaatgatgcaccacctgattgctgctgccgcgccagatcagggaagggtcttttaaatcctgcacaaatttgccgtcgaccagcacgttaatcaaatcaacaacctgcatttgcgcagcgttgagttcgtcgagtttatagcctgtccacacccagatgtctttacccggacactcggcgcggatgcgttgtaccagtttcagaatatccggcacgttttgcggatgcagcggatcgccgccggagagggaaataccctggcgtttgatacgagtgtcattcagatcgttaatgatctggtcttccattgctttggtaaatggctgaccggaatttacccgccatgtgcttttgttatagcaaccggggcattcatgaacacacccggagacaaacagggtgcaacgagtgccggggccgttgacgatgtcgacaggatagtactgatgataattcattatttcgcctggcttatcagtccgcgtgtaggctgcatccggtaatcaatgcctgatgcgacgctgtcgcgtcttatcagacctggagcaattgccaaatgtaggccggataaggcgtttacgccgcatccggcatttgcttagctcagagtgaagattaacctatctgcccattccccaaatgtttaacgcggcgcttaacttcttcctgcttaccagcgttaaacggacgtgcatccgggctacctaaatatccgcacacgcggcgagttaccgacacacgggaggcgtcatggttaccacatttcgggcaagtgaagcctttgctggtgcactcgaactcaccggtaaagccacactcgtagcactcatcaatcggtgtattggtgccgtaatacggtacatgctgatagctgtaatcccagacatcttccagcgccttcaggttgtgctgaatgtttggatactcgccgtagcaaatgaaaccaccgttcgccagcggcgggtaaggcgcttcaaagtcgatcttgtcgtacgggttcaccttcttctccacatcgaggtggaaactgttggtgtagtaacctttatcggtcacgcccggcaccacgccaaactcagcagtatcgagacggcagaagcgatcgcacaggttttcactcggcgtgctgtagagactgaaaccataacccgtttcttctttccactgatccactgcctgacgcagacgttcaacaatggcgatacctttcgcgcgaagctgctcgttgtcgtaaacatgctcgccgccgaacagcgcgttaatggtttcgtggatgccgatgtaacccagcgaaatagacgcacgaccgtttttgaagatttcagaaacatcatcgtcagcattgagacgcacgccacaagcaccttccatatagaggatcggggccacgcgcgctttcacgccttcgagacgagcgatacgggtcatcagcgccttacgtgccagcaccagacgttcatccagcagcttccagaaggtggcttcatcgccttttgcttccagagcaatacgcggcaggttcaggctgatcacgccgaggttgttacgaccatcgtggatctgctcgccgttttcattttcccacacgccgaggaagctgcggcagcccatcggagttttaaacgaaccggtgactttcactacctgatcgtagttcaggatatccggatacatgcgcttgcttgcgcactccagcgccagctgtttgatgtcgtagttcggatcgccttttttatggttcaggccatcgcgaatcgcaaacaccagtttcgggaacaccgcagttttacggtttttaccgaggcctgcgatacggttacgcaggatcgattcctgaatcaggcgcgattcccagctggtgcccaggccaaaaccaaaggttacaaacggcgtctgaccgttggcggtgtgcagggtgtttacttcgtactccagtgactggaaggcatcgtagcactctttgatggttcgagagttagcgtagccttcggcgtccgggatgttccactcttctgcggtcttgcgatgtttgttgtagctggcagtgacaaacggtgccagcacttcatcgatacggttaatggtggtgccgccataaatatggctggcaacctgagcaataatctgcgcagttaccgcggttgccgtagagatcgacttcggcggttcaatctcggcgttccccattttaaagccctgggtcagcatgcctttcaggtcgatcaacatgcagttgaacatcgggaagaacggtgagtaatcgagatcgtgatagtgaatatcgccacgctcatgtgcctgcaccacgtcacgcggcagcaggtgctgacgtgcatagtgtttagccacgatcccggccagcaggtcgcgctgggttggaatcaccttgctgtctttgttggcgttttcgttgagtaacgaggcgttggtctgctcgaccagaccacggatctcctggttcaggcgaccgcgtttttcacgttcaatgtcgcgatcgtgacggtactcgatgtaagcacgagccagttgtttgtatggacctgacatcagctgattttcaactgcggtctggatctcattgatatccacctggttgcggccctgcatctgctcgctgacaaccgcggcaacagtggcgcaataatcggcatcatcgacttccgctgctttagctgcacgcagaatcgcttctttgatgcgctctgatttaaacggcactttgcagccgtctcgtttcatcacatgcggtgtcatgatcgctccatatttttaagaacaggttatccacagaaattgggaaaggcgttttccggttttttcgtttcgttttccggtgctttccgcaatcgccatccgcttatccacaacgccgcacctttttcgtggggagctgtagtagcaattatagtcgattaatacaacatattgggttgggacgcattttaaagtctatatatagtgctttgcatcaaggatgtttgagctttttttgatgtagctcaaagtaaaaagcagagcgtacggatgacgggcgctacagcgatatgtaaattttttaatgaatttgctggttgaaaaatcaacaaaaacaacatactgacagacaaaaccccggaatgaccggcattaccggggcttagggaagatttacttctgtaaccaccagacagcctcaaaaggccgtaaattcatggcacagggttgtggtgaggcttcttcgtagttatgcatcacaagctgccagttgccgcgcatttgccctgcctgccagggttggatctcacggctaaggttggcaatgaccagcaaggtttgccccttccattcacggcgatagcaccacaatacagggctgtttggcagcagatcctggtaattgccccatgtcaggatggcttcctgcttacgcagtgcgattaacttttggtaggtgtaaaacaccgaggaatcatcggccagcgcggcttctacgttgatttgttgatagttatcgcccaggccaatccacggttcgccagccgtaaacccggcattatcgccgttgctccattgcatgggcgtgcgactgttgtcacgggatttactggcgaggattgccaataactcgtcggcatcacgcccatcgttgcgcagctcggcaaacatattgaggctctctacgtcgcgatagtcagtaatgcgcgtgaaatgcgggttggtcatgccaatctcttcgccctggtagatatacggcgttccctgcatgccatgcagcaccatcgccagcatttttgccgcaggcacgcggtattcaccttcatcaccaaagcgagaaacaatgcgcggctgatcgtggttacaccagaacaaggcattccatgctacgttgtgcattccttgttgccagtggcggaacaatgttttcaacgccacaaagtcaggtttagccagcgtccatttttcaccaccgggataatcgaccttcaggtgatgaaaattaaaggtcatcgacaattcactgcctgtcagagccgcgtatcgctggcaatgctcaaggctggtggaggacatttcacctacggtcattaacccgcgtggcgtaaacacatcgcggttcatctcgtgcaaaaactcgtgtgctcgtggcccgtcggtgtagaagcgacgcccgtcgccgtccaggtcttcagggaaacgcgggtctttggagatcagattcaccacatccaggcgcaacccgtcgaccccacgatcggcccagaactcacagacttttttcagctctgcgcgtaccgctggattctcccagttgagatccgcctgttctggtgcaaagagatgcaaatagtactgttcgctttccgcatgccagcgccacgcactaccgccaaattttgaacgccagttgttcggtggcgtttctggttctccatcgcgccagatataaaactggcggtaagggctttctttgttcagcgcctcgcgaaaccaggcatgttgggtagaggtatggttaaacaccatatcgagaatgatacgaatcccgcgcgattttgcctgcgtcaccagttcgtcaaaatcgtccagcgtgccgtaggtgggatcaatcgccgtatagttcgctacgtcgtaaccgttatcgacctggggagagacataaaagggggttagccagatggcatcaacgcccagtttatgcagatagtccaggtgttggataacgccacgtaaatcgccggtaccgctacccgtggtgtcctgaaaactctttggataaatctggtagataacgccgttttgccaccagtggggaagatgagtcattacgttattcctgcgaatgcgagggggcgcaattgcgccccgaagaaaattaaacaatgtccagcgtgcccaggcggtatttccgctgatagataaacgaggtgagtacaatcgggatgatgatggcgatagccattgccagcgcaaacacctgccagtagctcggttgaatcgagagaattcccggcaggccgcctacgccgatgccattcgccataacgccgttcaggccgcatagcaatcctgccagaccagaaccaatcatcgcgcacagcatcgggaagcgatatttcaggttgatgccgtacattgcaggctcagtgaccccaagccaggcggagatagcggcaggcacggagatctcgcgttcattgtgcttgcggctggaaatgataatgcctatcacggcggagccctgagcgatattcgacagcgcaatcagcggccacactggcgtaccacccatgctttgaatcatctgcaaatcaatagcaagcgtggtctggtgtacaccggtgatcaccagcggggcgtacaggaagccaaacaatgctgcgccaatcggagcaaagctgccggtcatcaggtgacgtaccgcaaaggcaacgccatcgccaatcatgcgaccaaacggaccaatcagcgcatgggcgaggaacaccgcgaggatcagcgaacagacgggtaccaccaccagatagaggtaatccggcacgatgcgtttaaggcgagtttcaataacgcccagcgccagtccggctaacagtgccgggatcacctgcgcctgatagcctactttggcgatgctgaacatgccaaagtcccacacttccggcagctgctgcccgagcagataagcgttcatcagctgtggagaaaccagtgtcacgccaagcacgataccaaggatcggcgtgccgcccatttttttcaccgctgaccagcaaataccgaccggcaggtagaagaagatcgcttcaccgatcaaccacagaaaatcgtagatcgtttgcagggaagggtacatttgcgccagcgtctgaccgttgctcatgggcaaatcgccgatcacattgcgaaaaccgaggatcaaaccgccgctaatcaacgcgggcagcaacgggaagaagatcaccgcgaaatgagagatcaactgctcatgccatttcatattatgccgggcggctttttttacctgctctttatcaacctgcgcctgtccggttgacgcaatcagtgcttgatagtaatcacccacgttggtgccaatcaccacctgaaattgcccggcattggtgaaacagcctttcaccatagggagttgctcaatttctttcggtctggcattggccggttggttgaggacaaagcgtaggcgagtaatacagtggctcaccgtcgcaatattgccgcgcccgccgaccagttcaatcaaccgatcgatatccgtttggtttattttgctcatcataaagccccatggcagatgacatttttggttggctgcagaatatattgcgcggaaaaatttaaaaacgggaacgttcccgaaacgcagcgaagatcacaatttatcgttcaggaaacgatcaggacagggtggcggggatgatgatttgttgcggttcgctgcgcccggttacctgcgcgatcaactggcaagccgcctggcgtccagcttcggcgtaaccgggatctacggttacgatctccggatggaggaatttcattaacggcgtattaccgacgctcgccagttgcaaggtgtcgatgcgttgctcttgcaggtatttacttgcgccaagtgccagcgtgtcggttgcgcacagtaaggcggtagtttcaggcgtaatcacttttgcaacgttctcatagccttgcttcatagcaagccctggcagggcggcaacgggatgcagtttatgcgctttgcagaacgccaggtaggcttcgtgacgtcgcttaccggttgtcacgtcactgtgcggcacgccgagataactgatattacgatgcccctggtcatacagccgttgcatcaggattttgattgccccttcgtcgtcataacagaccgaagcaaagccttttgcgtcacgcgccagcagaaccagcgatgactgccagtgggctaacatttcttctgttatgccagtaaaaccgaacagcactacgccgtcgatattacgccgtttcagcactcccaaatgttcggcaactaattgcggggaaaactgactttccatcatgattgggtcgtaaccttgttcatagaacgctggcagcatggtttgaacggcgagattttctgacaacgaatccagacgggtaacaatgatggcgaccactttatcgctttgcccacgcatagcgcgcgcagagcgggaaggggaaaatccatgctgattcatcactgcttcaacacgctcgcgggtgagctggctcacgccgctttcgttattcagcacccgggaaactgtagatttccccacgccgcttaagcgcgcgatatctttgatggtcagccgattttgcatcctgttgtcctgtaacgtgttgtttaattatttgagcctaacgttacccgtgcattcagcaatgggtaaagtctggtttatcgttggtttagttgtcagcaggtattatatcgccatagatgctacgaatattattggattctccttattatttgcggcgcttttttcacttaccggaggttatatggaacctgatcccacgcctctccctcgacggagattaaaacttttccggtaagcccgtcttttcacggcgttaccggatgcgtaaggccgtgacgttttaacgtccctgctcagctttattaccttcaggtaaggcttcgccacgcctgaagacatttctgtactgtttcagacagtgcggagggactccttatgtttaaagaaatttttacccggctcattcgccatttaccttcccgtctggttcatcgtgatccattgcctggcgcgcagcagacagtgaatacggtggtcccgccgtccttaagtgcgcattgcctgaaaatggcggtgatgcccgaagaagaattgtggaaaacgttcgacacccatccggaagggttaaatcaggcggaagtggaatctgcccgcgaacaacatggtgaaaataaattacccgcacaacaaccgtcgccgtggtgggtacatttatgggtctgctatcgcaacccctttaatattttactcaccattctcggcgctatttcttacgccacggaagatttatttgctgcgggcgttatcgcgctaatggtcgctatttctacgttgctgaactttattcaggaagcacgttccactaaagcggcagatgccctgaaagcgatggtcagcaatactgcgacggtgctgcgcgtaattaacgacaaaggcgaaaatggctggctggagatcccgatcgaccagctggtgcccggcgatattataaaactggcggcgggagatatgatcccggcagatttacgtatcttgcaggcgcgggatctgttcgtcgctcaggcgtcgttaaccggtgagtctctgcccgtagaaaaagccgctaccactcgccagccggagcacagcaatccgctggagtgcgacacgctgtgttttatgggcaccaccgtggtgagcggcacggcacaagcaatggtgattgctacaggtgccaatacctggtttggtcaactggcggggcgtgttagtgagcaggaaagcgagccgaatgcctttcagcaagggatcagccgcgtcagtatgctgctgattcgctttatgctggtgatggcaccggtggtgctgttaatcaatggttacaccaaaggcgactggtgggaagcggcgctgtttgcgctttcggtcgcggtaggcctaacgccggaaatgttgccgatgattgttacctcgacgctggcgcgcggcgcagtaaagctgtcgaaacagaaagtgatcgtcaaacatctggatgctattcagaactttggcgcaatggatattctgtgcactgataaaaccggcaccctgacgcaggataaaattgtgctggagaatcataccgatatctccggtaaaaccagcgaacgcgtgctgcatagcgcgtggttgaacagtcattatcagaccggacttaaaaacctgctcgatacagcggtgctcgaaggtacggatgaagagtcagcgcgctcgctggccagtcgttggcaaaaaattgatgagattccgtttgatttcgagcgtcgccggatgtcggtggtagtggcagaaaataccgagcaccatcagctggtttgcaaaggtgcattgcaggaaatcctcaatgtgtgttcgcaggtgcgtcacaatggcgagattgtgccgctcgatgacatcatgctgcgtaagattaagcgggttactgatacgctgaatcgtcaggggctgcgcgtggttgcggtggcgacgaaatacctgccagcgcgtgaaggagattaccagcgggcggatgaatccgacctgatcctcgaaggatatattgcttttcttgatccgccaaaagagacaaccgctccggcactgaaggcattaaaagcgagtggaattaccgtaaaaatccttactggcgacagtgagttagttgcagcgaaagtgtgccatgaagtggggctggacgcgggagaggtggtcattggtagtgatattgaaacgctatctgacgacgaactggcaaatcttgcacagcgtaccacgctgtttgcccgcctgacgccgatgcataaagaacgcattgtgaccttactgaagcgcgaagggcatgtggttggctttatgggcgatggtattaatgatgcgcccgccttacgcgctgcggatatcggcatttctgtggacggcgcggtagatattgcccgtgaagcggctgatatcatcctgctggaaaaaagcctgatggtgctggaagagggggttattgagggacgtcgcactttcgccaacatgctgaaatacatcaaaatgacggcgagctctaacttcggtaatgtgttcagcgtgctggtagcgagtgctttcttgcccttcctgccgatgttgccgttacacttgcttattcagaacctgctgtacgatgtgtcacaggtggcgatcccgtttgataacgtcgacgacgagcaaattcaaaagccgcagcgttggaatccggcggatctggggcgctttatgatcttcttcggaccgatcagctcgatcttcgatattttgacgttttgcctgatgtggtgggtattccatgccaacacgccggaaacgcaaacgctgttccagtcgggatggtttgtggtgggcttactgtcgcaaacgctgattgtgcatatgatccgcacccgccgtgtgccgtttattcagagctgtgcatcgtggccgttaatgatcatgaccgtgatcgtgatgattgtcgggatcgcattgccgttttcaccgctggccagttatctgcaattacaggcgctgccgttaagctatttcccgtggctggttgcgattctggcagggtatatgacattaacccagttggtgaaagggttctatagccgtcgttacggctggcaataaagaataaactgggcacgatagccccgattcagattgtagacaaagtgagttttgttcatgccggatgcggcgtaaatgccttatccggccaacaaattcaataaattgcaggaatcacgtaggcctgataagcgtagcgcatcaggcgattttgcgtttgtcatcagacttaatccgggcatgatagcccggatttccatcaagattagcgacgaacagcgatcgcttcgatctcaatcttcacgtctttcggcagacgggcaacttcaacgcaagaacgtgccgggaaggtggcgttgtgttcggtgaagaaggcttcgtaagtggcgtttacggttgcgaagtcgttcagatcttttacaaacacggtagttttaacgatgtcgcccactttcaggccagcggcttcgacgatcgcttttacgttatccagcgactgacgtgcctgtgcagcgacgtctgccggtacttcgcccgttttcggatttaccgggatctgaccggaggtgatgatcatattgcccagatcaacgccctgtacgtaaggaccgatagctgccggtgcattttccgtcgcgatagttttgctcatgatttctcctttattacagcggtaaaaagtctggctcattatagggagccagacttttattaccaaccgcaattaattggccagcaccacattatgggaaaactctttttcacagtatttgcatttgagcgcgatatcattggcgcgttttcgcacggcaaagctggatgaaaccggttcggcatggctgatacagttgctgttcgggcagaccagcacattgtcgatgcgctccggcagacttgggcgcgatttacccaccacttcatagttgtcgatacggttaaccgtggcttgcggcgcatacaatgccagttgatctacttgatcttcactcaaaaaggtattttcgattttgatcagatctttgcggcccatctcgccagaaggcaggttcagaccaatggtgatgcgctgatccgtttcggtcagcttgaacagactcaacagcttaaaaccgatctgggcggggatatggtcaattaccgtgccgcgtttaatagcttcaacctgcaatttattatcgtgtgtcatctctatttccccttacagtaccagatcgcgattcagaaccagtgccagtaacgcctggcgagcgaaaatcccgttgcctgcctgctggaagtaccaggcgtgtggcgttttatcaacatccgtcgcaatctcatcaacacgcggcagcggatgcagcactttcatattggctttggcgttgtggagatcgctggcgcgaagaacaaactgcgctttcacgttggcgtactcggacgggtccagacgctctttttgcacgcgggtcatgtacaggatgtctacttccgccatcacttcttcaatagagctgtgcagactccatgcgatccctttttcatcgagcatatccagaatgtattgcggcattgccagcgcgtccggcgcgatgaagtaaaaacggttgccgtcgaacttcgctaacgcctgagtcagggagtgaacggtgcggccatatttcaggtcaccaaccattgcgacgtggagattgtccagacgcccctgggtttcctgaatagtgaataagtccagcaaggtttgcgtcggatgttggttggagccatcaccggcattcagtaccggtacattgccggaaaactcggtggccaggcgcgccgcaccttcctgcggatgacgcatcactatcgcatcgacgtaagtgctgataaccgaaatggtatcggccagcgtttcgccctttttacccagtgatgtattggcgctgtcggagaagcccaccacgctggcccccaggcggtgcatagatgtttcgaaagagaggcgggtacgggtagaggcttcgaagaaacagctggcaatgactttgtgcttcaacagctctggttgcgggtttgctttcagtttcgccgctgtcgccagcaccagattaaggtcatcgcgactaaggtcgtttatggaaatgatatgtttctgatatagcggattagccatcttttatctcctgacgcctgggcaaaaaaaagcccctcgattgaggggctgggaatgggtgatcaacgggaagaaaaacggcaggccagcgtcttttttcagacgcggtaagacaaaatgtcgaacacactgaaccatacatcctcccggcaaattgtccggcattatactcatcgtcagaagcggcgcaagcatttgatgcaatattttgtcagcgcaaacggtttatttgaattaaaagtcaaggtatatgcatttttatttgatgtgattctgcaggggaactgtccttcggtatcaataattgcagacattccctgctttttcctttttcactttcacgcaatcagatatgcattttattccattcatccgacttatagggcggagtgtgaaagcgaacggctaacactattgcttactgctcagggatgcgcgctatcactttaatttcaaaatcaaagcctgccagccatgtaacacccaccgccgtccagtttggataaggtggggcgctaaatatttcatttttcaccgtcatgatgtcttcaaattggttttctggatcggtatggaagctcgtaacatcaatgatatcgtcaaaagtgcatcccgcagctgccagggtcgcatgcaaattatcaaatgccagtctgacttgttgctgaaaatcgggttctggtgttccgtcctctcgacttcctacttgcccggaaacaaacagcaaatcgccggaacgaatagccgcagaataacgatgctcagcatatagtgaatgtcggccagcagggaaaacagcggttctttctaccatttggttatcctcaagatttacgacatgaacagaagatttctctttaccgggagccgcttttagcggacgacgtgagtaaacaaaacccagacatcatggataatggctgggcttaattgagcgtagtcggttatgcgccaaacgcgccatcaatggtatgcatcgcgccggtaacaaaactggcttctggccctgctaaccatgcgaccataccagcgacctcttccggttgcccatgtcttttgatagccatcaaactatgcaacatatcgcgcattggcccgttggcgggattagcgtcggtatcaattggccctggctggacgacgttaatggtgatcccacgcggtccaaaatcacgggccagcccgcgcgccatgccttgcagggcagatttgctggcggcataagcagccatgcctgcaacaggcatacgatcgccattcacggagccgatgattaagatgcgcccgccttcgggcatctgccgggcggcttcaacagaggcatgataaggagcatgaatattgattttgaaaaggcgatcaatatcgtcggcatttaattccagggcctcgccaaagacgccaatacctgcatttaccaccaggatatccaatgcgccgctcttacgaacgacatcaatgacagcgtctctgtcagcactatctgtgaatactgctgtcgctccagtctcttgtgccaggcgtttagcggcatctttcgaccccgcataggtgaatcgtacattggccccatcggtgacgaaacgacgtacgatagcggcaccgataccacgactgccaccgaggatgagaactgtcttacctgtaaaagcgcccataaggactccttgatttattatgtaacatgcattacaaaactgttttaactttctgtcaacaggttttgtaatggtcactaaaaaacaatctcgcgttccaggtcgtcccagacgtttcgctcctgagcaggcaatctctgcggcaaaagtgctttttcaccaaaaaggtttcgatgctgtcagtgttgctgaagttactgattatcttggtattaaccccccgagcctctacgcggcttttggcagtaaagctgggttatttagccgtgtactcaatgaatacgtcggtacggaagctattccgcttgccgatattcttcgtgatgatcgtccggtaggcgagtgcctggttgaggtattaaaagaagcggcgcgcagatatagccaaaacggcggctgcgctggctgtatggttcttgaaggtattcatagtcatgatccacaagcgcgtgatattgccgttcaatattatcacgccgcagaaacgaccatttatgactacatcgccaggcggcatccacaacgcgcacaatgtgtgactgattttatgagtaccgtgatgtctgggctttctgcgaaggcacgagaggggcactctatagaacaactctgtgcaacagctgcaatggcgggggaagcgataaaaactattcttgaggagtgatgcgggccttgacccgaaaggcgggaaagcgcctgccgataagttgtgataagacaataattcacgcgttaaggctagcggaattgattatcttttcgtataacgatagaaatgaagcgttgttttaattaaggagtggaaaagatgatcatcggaaatattcataatcttcagccgtggctaccccaggagttacgccaggcgattgagcatatcaaagcacacgttacggcagaaacgccaaagggcaagcacgatatcgaaggcaatcgactgttttatcttatctcggaagatatgaccgagccgtacgaagctcgccgtgcggagtaccatgcccgctatcttgacattcagattgtgttaaaaggtcaggaaggcatgaccttcagcacgcaacctgcaggcgcgccggataccgactggttagctgataaagacatcgcatttttgccggaaggcgttgatgagaaaacagttattctaaatgaaggtgattttgttgtgttttatccgggggaagtgcataaaccgctgtgcgcagtgggcgcgccagcccaggttcgcaaagcagtagtgaagatgctgatggcgtgatgacttttcgccgtaaataactcaaggtttacggcgagtttgtgaaaagagcgttttttgatatttttttgtgagtaaaatttgtaatgcttagacgttcttattcactcaaggagttcgtcatgagcaaaatatcagatttaaattattctcaacacattacattagccgacaattttaaacaaaaaagtgaagttttaaatacctggcgtgttggaatgaatgattttgcccgtattgccggggggcaggataacagaaggaatattctttctcctggagcatttttagagtttttggcaaagatatttaccctgggttatgtggattttagcaaacgctccaacgaagcgggtagaaatatgatggctcatattaagtcctcatcttattctaaagatactaatggcaatgaaaaaatgaagttttacatgaataatcctgtaggggaacgagcggattcacccaaggtgattatagaaatttcactttccactatcactactatggggactcgtcaaggacatacagccattatatttccacaacctgatggttcgactaaccgttatgaagggaagtcctttgaaagaaaagatgagagttcattacacctgattactaacaaggttctggcgtgttaccaaagtgaagctaacaagaaaatagcgcgtctattaaataataatcaggagttaaataatctacagaaattaaataatctacagaagttaaataatctactgaagttaaataatatacaggggttaaataatcctcaggagttaaataatccgcagaatttaaatgattctcaggagttaaataactcgcaggaattaaatagtccacaggagttaaatgatccgcaggagttaaataattctcaggacttaaataactctaaggtgagttgtacagtttcagttgattctacgattacgggtttattaaaagaaccattgaataatgcattattagcaataaggaacgaacatctgctattaatgcctcatgtatgtgatgaatcgatttcatacttactgggcgaaaaaggtatacttgaagaaatagataagctctacgcattaaatgatcacggaattgataatgacaaagtaggtaacaatgaaattaatgacatcaaagttaacctgtctcatattcttattgattccttagatgatgcaaaggttaaccttacaccggtcatcgattcgattctggagactttttcaaaatccccatatattaatgatgtaagaatactggattggtgttttaataaaagcatgcaatattttgatgatactaaaaagataaagcatgcatgctccgtaataaatcatattaatcttcgcagcgatcagtctaaaatagctgagacattatttttcaatctcgataaagaaccctataaaaatagccctgaattacaggggttgatttggaataagttggttgtatatgtcaatgaatttaacttaagtaatcgagaaaaaacaaatttaatacaaaggctatttgataatgttgagtctatatttaatgaagtacctgtcagcattttagtgaatgatatttttatgaatgatttctttatgaaaaatcctgagatgattaattggtacttccctcagttacttaagagttatgagggtgaaaagatttattttgataatttaaaatatgatttaaatgataatgataaggaatctaataaagaaattttgaagaatcaaccagataatgttatcaaagaaaaactgaataatgaatacaaacttagatttagaatgatgcaaactatcttgcaatcgagagttaatgtattaccatatattaatgaacagcgtttaaataaactaaatccaccggaaaatttacgtatagcaatagaacactttgggtggaagaatagacctatcactgcataaaataatgtgatgccgggatggtttgtatttcccggcatctttatagcgatagcaattatttactgagcgtcgcgaccatcaccgctttgatagtatgcatacggttttccgcctgatcaaaaacaatgctggcggcagattcgaagacctcatcagtgacttccataccgccatgtaggccaaattcttccgccattttcttgccaagcgtcgtttggtcgtcatgaaacgcgggcaggcagtggaggaatttgacctccgggttaccggtcaactgcatcatcttgctgttcacctgatattcacgcagcaatgcaatccgttccgcccatttctcttttgcttcccccatcgacacccacacatcggtatagataaagtcagcaccttcaactcccttcgcgacatcttcagtcagcgtaatattcccaccattttgctgtgccagggcgcggcattccgtaaccagcgcagcttccggccagcacgcttgtggcgcgaccagacgcaaatccagaccggtaagcgccgcagcttcgagcatcgaattgcccatgttgttacgcgcgtcacctgcatagaccagcgtcatttcgttgaacgctttgccgggcaaatgctcctgcatggtgagaagatccgccagcagctgcgtgggatggaactcattggtcaggccattccataccggcacgctagcgtattccgccagtgtttcgacaatctcctgaccatagccgcgatactgaataccgtcatacatgcgaccaagcacgcgggcagtgtctttaatcgactctttatgaccaatctggctgccgcttgggccgagataagtaacgcgagcaccctggtcatatgcggcaacttcgaaagagcatcgggtacgagtcgagtctttttcgaagatgagcgcgatgtttttaccagtgagtttggcttcttctttaccgcttttcttatcggctttcagcttcgcggctaactgcagcaggctgttgagttcagctggcgtgaaatcgagtaatttcaggaaatgcttatgataaaacccggacatagatccctcctgtggctaacgcctcaatgaattaaaattcaatttatatggatgattattcatttgcaagtctaaagcataaatctttgtcacaaaggtggaggcaatgtcagtggtgtgtgacaataagagtatcggcaggacattaagaggaatgagccatggcaaacccggaacaactggaagaacagcgtgaagaaacacgtttgattattgaagaattactggaagatggcagcgatccggacgcgctgtacaccatcgaacaccatctttccgcagacgatctggaaaccctggaaaaagcagcagttgaagcgtttaaactcggttacgaagtgaccgatccagaagagctggaagttgaagatggtgatatcgtgatttgctgcgacatcctcagcgagtgcgcgttgaatgccgatctgatcgatgcccaggttgaacaactgatgacgctggcagagaaatttgacgttgagtacgacggatggggcacttactttgaagatcctaacggcgaagatggcgacgatgaagattttgtcgatgaagacgatgacggagttcgccactaattaagcgtagcgcatcaggcccaggtagttcctgcaacctggtgaatttgtagcccggataaggcattcatgtcacatccggcataaacaaaacgtacgttgttaatgttcgaatgcccgcgagttgaacacgcgggcatttttttagagttcgcgcaacatccgcacttcacaatcgacatggcccgtgcagccaagcgcatagtcgatatgctcaaagcccaaatgctcataaagcgcaatggcttcctttaaaaaagcggtcgtttccagatagcagcgtttgaaacccatctctcgcgcctgctccatcgccattaaggccagtttttttgccagccctttgccgcggatagccggaagaaaatacatcttttgcagttcgcaaatatccgactcactcccggttaatggcgctatcccaccgccgccgaccacttcaccctcgtactcaacgacccaatatgcatggccaggctgactatatacttgatacagctcgtcaagattcggatcggcgacggtgtagcctttatcagcggtaagaccgtattcggcggatacctgacgaatgacgcgggcgatagcaggattatcctgcagcgtcaggcgacgcattacaggtgattgcggcgcaatgttattcatagtttaacccaataaaaataaagtaattatacatttgtttaataccactctcttcttacgtacgcaagcgacttataaagtaataaagtttttgccagcctattactgataagagtattgtaacgtggcagaacattttactgtctgtatatataagttatatcaatggattttttaattcagggaatttttatggctcaagttattaatgaaatggatgttccgtcccattcgtttgtttttcatggtacaggtgagagatattttcttatttgtgtggtgaatgtgttgttaacgattataacgctaggtatctatttaccatgggcattaatgaaatgtaagcgttatctttatgctaatatggaagttaacggacaacgattttcttatggaattaccggtgggaatgtttttgttagttgtcttttttttgtttttttctatttcgcaatcttaatgacagtgtcagcagatatgccgcttgttggttgtgttttgactttgttactgttggttttgcttatatttatggcagcaaaaggactgcgtcatcaggccttaatgaccagtctcaacggcgtaagatttagttttaattgctctatgaaagggttctggtgggtgacctttttcttgccgattttaatggccattgggatggggactgttttctttatctcgacaaagatgctacctgccaatagttcaagtagtgttattatatccatggttctgatggcaatagttggtattgtttccattggtatttttaatggtactttatatagtctggtaatgagttttctctggagtaataccagtttcggtatacatcgtttcaaggtgaaattagatactacgtattgtataaaatatgccattctcgcatttttagctttattgccttttctcgctgttgctggttatattatcttcgatcaaatattaaatgcgtatgatagttctgtatatgcaaatgatgacattgagaatttacagcaatttatggaaatgcaacgtaaaatgataatcgcgcagttaatctattattttgggattgctgttagcacaagttatttaacggtgtctttgcgaaaccattttatgagcaacctgtcactgaatgatgggcgtattcgttttcgcttaactttaacgtaccacggtatgctttatcgcatgtgtgcgttggtggtgatatccgggattacgggcggtctggcttatccactgctgaaaatatggatgattgactggcaggcaaaaaatacgtatttgctgggcgatttggatgaccttcctttaatcaataaagaagaacaaccagataaaggcttcttagccagtatttcacggggagttatgccttctttaccatttctgtaagagataaaaaaggccggagcatgctccggccttcgttttcatcactgtgttttgattacagcgcggcgataacagcctgctgttcaatcagtttcgctttcgcttccgcatagccttccagcttctcacgctctttcgcgatgaccgcttccggtgcgcgggcgacaaagccttcgttcgccagtttgttctcgatacggctgatttcaccttcaatcttcgccacttctttcgccagacgcgccagctcatcttctttgttgatgaggccagccatcgggatcagcagctctgcaccgtcgatgatcttcgtaacggaaaccggacctttgtcatcggcaggcagcacggtgatactttccagacgcgccagggtttgcaggaagccacggttttcatttacgcgacgttctgcatccgcgctgcaaccacgcagcagcagctccagcggtttgcccggcgcgatgttcatttctgcacggatgttacgtaccgcaacgatcgcctgtttcagccattcggtgtcggccagtgcggcttcatcaacctgagatgcatcgtactgcgggaacggctgcagcatgatggtgtcggcagtgataccgcaaagtactttcacacgctgccagatggtttcggtgatgaacggaatgatcggatgcgcgaggcgcagcagaccttccagtacagtcaccagcgtatggcgagtaccgcgcagttctgcttcggtgccaccgttcattaccggcttggtcagctcgagataccagtcacagaactggttccaggtgaactcatacagaatgcctgcggcgatatcgaagcggaagctgtccagcgcttcgcggtacgctttgatggtctggttgaactccgccagaatccagcggtccgccagcgacagcgtcatttcgccgccgttgaagccgcaatcctgaccttctgtgttcatcagcacaaagcggctggcgttccacagcttgttacagaagttacggtaaccttccagacgcttcatatcccagttgatgtcacgaccggtagacgccagcgccgccagggtgaagcgcagcgcgtcagtaccgtgcggctcaataccgttcgggaactgcttctcggtgcgcttacggattttgtccgccagctgcggctgcatcatattgccggtacgtttttccagcagttctggcagcgaaataccgtcaaccatatccagtgggtcgataacgttacccttggatttggacatcttctggccttcgtcatcacgaatcaggccggtcatgtaaacggtgtggaacggcacctgcggtttgccattttcatctttgatgaagtgcatggtcatcatgatcatgcgggcaatccagaagaaaatgatgtcgaaaccagataccatcacgctggttgggtggaactgacgcagggcgtcggtattttccggccagccaagggtagagaaggtccacagcgcagaagagaaccaggtatcgagaacgtcttcgtcctgacgcaggacaacatcagcaccgaggttattttctttacgcacttcgtcttcgttgcggccaacataaacgttacccgcttcgtcataccatgccgggatacggtgaccccaccacaactgacgagagatacaccagtcctgaatatcgcgcatccaggagaagtacatgttttcgtactgcttcggtacgaactgaatgtcgccgttctcaaccgcttcaaccgccggtttcgccaggacatcggcacgcacgtaccactggtcggtcagcattggttcgataactacgccgccacggtcgccgtaaggaacggtcaggtcgtgcggtttaatttcttccagcaggccaagcgcgtcaactgcggcaacgactgctttacgtgcagcaaaacgctccagtttctggaactctgcagggatttcgctggaataaacgtcagattcgttacctttggtatcgaacacctgggcgctttcacggatatcgccgtcaaaggtcaggatgttgatcatcggcagggcgtgacgtttacccacttcatagtcgttaaagtcgtgcgccggagtgattttcacgcagccggtgcctttttccatgtcggcgtgttcgtcgccaacgatcggaatacgacggttaaccagcggcagaatgacatatttgccaatcagatctttgtaacgcggatcttccgggttaacggctacgccagtatcgcccagcagggtttctggacgggtagtcgcgaccaccagataatctttaccgtctgcggttttcgcaccgtcagccagcggatagcggatgtgccacatcgaacctttcgattcgcggttttcgacttccaggtcagagatagcggtgcgcagtttcggatcccagtttaccaggcgtttgccacggtaaatcaggtcttctttatacagacgaacgaaaacttctttcaccgcattggacaggccttcgtccatggtgaagcgttcacgctcccagtcgacggagttgccgagacggcgcatctgacgggtaatggtgccgccagattccgctttccattcccagattttgtcgatgaaagcttcgcggccgtagtcgtgacgggttttaccttcttctgcggcaatcttgcgctcaacgaccatctgggtagcgatcccggcgtggtcagtaccgacctgccacagggtgtttttgccctgcatgcgctgatagcggatcatggtatccatgatggtttgctggaaggcgtgacccatatgcaaactgccggtgacgttcggcggcgggatcatgatgcagaaactttcctggctttcatcgccattaggcttaaagtagccctgcttttcccagtgctcgtaaagcggctgttcgatatcttgtgggttatatgtcttttccattatttccaggttgccgtattcaggttgaaaccagccacgcggtaggctttatagcgttcgcgcgccagttgtttcagagaatcttcataaggaacgaagtctaccacttctgtgaaagcggtggcaaaatctgcaaagcttgttcgcagactaatcaatatatcgcgccggctgctgctacgcttttgcggccaggcgatctccaccggtgcaccgccgcgcggtccttctcccgctaaattatgcggaacaaagctttctgccggacgcgcccacagggcttcatccagccggtaagcctgcttttcatcttcacaggcgatgagcacgcgcttaccgctgcgccaacgttctgcggcaatttcacacaccagttgctcaacggcgcttaagccatcgacggtggtgtcattgtccagaaggtagaacgtcgcgtttttcataaatggggcttcttgtggtggatttaaatacgcatcaggtatacaccgcagcgcctgatgcgacgctgttgtgtcttatcaggcctacgagttcagtgctgtgtaggtcggataaggcgttcacgccgcatccggcaataacagccttgcctgacgcaattactcttcgccgttaaacccagcgcggtttaacaggaactgtgccagcaacgctaccggacgaccggtggcgccttttgctttaccagaacgccaggcggtaccggcgatatccaggtgcgcccagttgtacttacgggtaaagcgtgacaggaagcaacctgcggtaatcgccccaccaggacgaccgccaatgttcgccatatcggcaaaattggactccagttgttcctgatactcgtcacccagcggtaagcgccatgcgcggtcaccggattgttcagacgcggcaatcagttcatgggccagcggattatggttcgccatcagaccagtaatatgatgacccagcgcgatcacgcaggcaccggtcagcgtcgccacgtcaatcaccgcttccggctcaaaacgctcaacgtaagttaacacgtcgcacagtaccaggcggccttcagcgtcggtgttcagcacttcaacggtttgaccggacatggtggttaacacatcgcccggacgataggctcgtccgccaggcatgttttcgcagcctgccaacacgccgataacgttaatcggcagttgtagctccgcgaccatccgcatcacgccgtaaaccgctgccgcaccgcacatatcgtacttcatctcatccatgccttctgaaggcttgatcgagataccgccggagtcgaaggttaaacctttacccaccagcacgattgggcgtgcatcttccgacgcgttgcctttgtactcaatcaccgacatcagcgattcgttttgcgaaccctgaccgaccgccagataggaatgcatccccagctctttcatctgctgttcgccgataacgcgggtgatgacattcttgctgtagctgtcagccagctggcgcgcttgtgaagcgaggtaagcggcgttacagatattcggcggcatattgccgagatcttttgctgctttaatcccggcggcaatcgccagaccgtgctggatcgcgcgctcaccgctggtcagttcacggcgggtcggcacgttgaacaccatcttacgcagcggacgacgcggttcgctcttgttcgttttcagctgatcgaaactgtagagcgtctcttttgccgtctcgacagcctgacgcactttccagtagttgttacggcctttaacgtgcagctcagtcagaaagcagaccgcttccattgagccagtatcattcagcgtattaatggttttctgaataacctgcttgtactgacgctcatccagctcacgttctttgccgcaaccaataaggagaattcgctcggaaagtacattcggaacatggtgcagcaacaatgtctgccccggttttccttccagttcgccccgacgtagcagggcgctgatgtacccatcgctgattttatcgagctgttctgcaatcggagaaaggcgacgtggttcgaagacgcccacgacgatgcaggcactccgctgtttctccgggctaccgctttttacactaaactccatgcactacgctcctgaatcttaaagacaacggcggtggctacagatagaattgcaagctttcgtaactcatgtccgctgttgcgatgacttcgtgttaatcttaacgttattacggcattggcacgtcagaacaaaatctgagaggtgaatccgttgagtataattatcttagcgacgatttcgacgactcaagagaataaatgacgtttaagccatgaaacaagctaaaatcctgcaaaagacgagtttttacgggcgtatttaaagtgataatcataagatatctggtgcgggagacgctcaaaagccagctggcgatactcttcatcttgcttttgatcttcttctgtcaaaagttagtgaggatcctcggcgcagcggttgacggcgatattccggcgaatctggtgctctcccttctcgggttgggcgtgccggaaatggcgcagcttatcctgccattaagcctgttcctcgggctgctgatgacgctgggcaaactgtataccgaaagtgaaattacggtaatgcatgcctgcggcctgagcaaagcggttctggtgaaagcggcaatgatccttgcggtattcacggcaatcgtagcggcggttaacgtgatgtgggcgggaccgtggtcatcgcgtcatcaggatgaagtgttagcagaagcgaaagcgaaccctggcatggcggcgctggcgcaagggcaattccagcaagcgactaatggcagctcggtgctgttcatcgaaagcgttgacggcagcgatttcaaagatgtgttcctcgcgcaaattcgaccaaaaggtaatgcacgtccttctgtggtggtggccgattccggacatttaacccagctgcgcgacggctcccaggtcgtcactctcaaccagggaacgcgcttcgaaggcactgcattgttacgtgatttccgcattacggacttccaggattatcaggcgatcattggtcaccaggcggtggcgctcgacccgaacgataccgaccagatggacatgcgcacattgtggaacactgacaccgatcgtgctcgcgcagaactgaactggcgtatcacgttggtattcaccgtgtttatgatggcacttatggtcgtaccgctgagcgtggttaacccacgtcagggacgcgtactgtcgatgctgccagccatgctgctgtatctacttttcttcctgatccagacctccctgaaatcgaacggcggtaaaggtaagctggacccgacgctgtggatgtggaccgttaacctgatttatctggctttagcgattgttctcaacctttgggacaccgtgccggtccgccgcctgcgcgccagtttttcgcgtaaaggagcggtgtgatgcaaccttttggcgtacttgaccgctatatcggtaaaactattttcaccaccatcatgatgacactgttcatgctggtgtcgctgtcgggcattatcaagtttgtcgatcagctgaaaaaagccgggcaggggagttacgacgcgttaggcgcaggaatgtataccttgctgagcgtgccgaaagatgtgcagatcttcttcccgatggcggctctgcttggggcgttgcttggtcttgggatgctggcgcagcgcagcgaactggtggtgatgcaggcttctggttttacccgtatgcaggtggcgctgtcggtgatgaaaaccgccattccgctggtcttgctgacgatggcgattggcgaatgggtcgcgccgcagggcgagcagatggcgcgtaactaccgtgcgcaggcgatgtacggcggctcgttgctctctacccagcaaggcttatgggcgaaagatggcaacaacttcgtctacattgagcgggttaaaggtgacgaagagttaggtggcatcagcatttatgcctttaacgagaatcgtcgtctgcaatccgtacgctatgccgctactgcgaagtttgacccggaacataaagtctggcgtctgtcgcaggttgatgaatctgatctgaccaatccgaaacagattaccggttcgcagacggtgagcggcacctggaaaaccaacctcacgccggacaaactgggcgtggtggcgctggacccggatgcactctctatcagcggtttgcacaactatgtgaagtatctgaagtcgagcggtcaggatgccggacgttatcagctcaacatgtggagcaaaatcttccagccgctatctgtggcggtgatgatgctgatggcgctgtcgttcatctttggcccactgcgtagcgtaccgatgggcgtgcgtgtggtcaccggtatcagtttcggttttgtcttctacgtactggaccagatcttcggcccgctgacgttggtttatggcatcccgccgatcatcggcgcactgttgccaagcgccagcttcttcttaatcagcctgtggctgttaatgagaaaatcgtaaccgaatgaacgaataaagggagcgaaagctccctttattattgttagcaaagtgtgcttcgttcattcctgaaaaataattaaaattcaatatattgcagtggggtgggcatgataagacgcgccagcgtcgcatcaggcaaagacaaatctcgcctgacttaccttcttctcccccccagcaaactccccaacatcccgcgtacaatctgattcgtcacttggcgagcggcgcttttggccattgtttgcaccacaccatctttcttcccgccgcgtggtccggtagtgccgaacaaaatatccttcaatccaccaagaatgccgtcatccaccgctacctctttccctttcgcgggaggattattttgctgctcggtactggcctgaaagcctttttgcaacatctcataggcggattcccggtccacctcatcctcatatttgccatacaccggagagtgattaatcaagccattacgctcatcttccgtcaccggccccatccgcgaacaaggcgcgatcaccatcgcacgctccaccacagaagggcttcctttcgcatccagaaaagagatcaacgcctcgccggtgcccagttcctgaatcgccttttcggtatcaaacgccggattggcccgcatggtttgcgccgctgccttcactgctttctgatcttttggcgtaaaagcccgcaaagcatgttgaacgcgattaccgagctgcccgagcacattatccggaatatcagacgggttttgcgaaacgaaccagacgcccacgccttttgagcgaataagccttatcacctgctcaatcttatccagcagtacctgcggggcatcgttaaacagcagatgtgcctcgtcgaagaaaaacaccagttttggtttctccagatcgcccgcttccggcaattgttcatacaactctgaaagcatccacagcaggctggcggcgtacagtttcggcatctgataaagtttctcggcgctgaggatattgataacgcctttaccgttggcatcggtgcgcatccagtctttgatatccagcatcggctcaccaaagaagtgtgctgcgccttgctgttccagcgacaacagcccgcgctggatggcaccaaccgatgcgctactgatattaccgtactgattctggaaggatttggcgttatcgccgatgtactgggtaattgcccgcagatctttaaagtcgagcagtaacagcccctgatcgtcagcaatgcggaagatgatattcagcacgccagattgcacatcgttgagattcaacagtcgtgccagcaacagcggccccagatccgaaaccgtcgcccgcaccggatggcctttctcgccaaagatatcccacaccaccaccggattggcatgcggttgccagtcattgacgccgatatttttaagccttgcgagcagtttttccgacaccgttcctgcctgcgcgacgccggtcagatcgcctttcacatcagccataaacaccggcacgccgatttccgacaatgactccgccagtttttgcagcgtaacggttttacccgtccccgttgcgccggtaatcagcccatgacggttagccattcccggcagtaaaaacagttctgtgtccggcgtgcgggcaattaacaggggttcactcatgagatatcctccagtttcctgcctggagtataggcaacgtccggcaaagagaatacgtgtaatgaagagaaaataacctaaagcgtgttgccgtgataaatctgatacccgaggtcaacagtgttgtggttgtgatcgttatttttaattttgctcagcaacatttgggcggccatccgaccaatatcaaaacggggagtaattacgctggcgaggcttgggatcatttgcctgccaatctccagcccatgaaaacccgcaatggaaatttgttctggcacggcgaggtttcgctcgcggcacagcagaagcgcacccatcgcaatatcgtcattggtgcaaaatacaccgtctaaatccgggtttgcgctaagggcatcacgcattaactgcattcctaaatgaatggatgagatggcgcgtggattcatgcgtaatggggaaagattatgcagcatcatcgcatcgcaatacccctgataacgctgttcatcgcgggtgtcatctttggaaccgagatacagaattttgtgcctgactcgcttctccagcatggtacacaccatgtcaaaagcggcctgccgattatcaaaaccgacctccatatccagccgttctccctgtacatccatcaattccacgaccggaatggtggctgaacgcagaaatttcaccgtcctgatggtgtgatatttttccgaaagtataatcccgtcaatgttataagagagcaggttaatcaccgactcttcttcggaatcgcgatcgtaattgtaattagcaataagggtctgataattatgctcagaggtgacggattctattcccgcgagaatgtcagcgaagagttgattttgaaatgacggaatcaagataccgagggtataactttgtgcattcaacaacatgccgggagcgcgattagggatataattgatctcttccataattttggcgatgcgctcgcctgtttcctttgccacctttttcggcgagcggatataacgactcacggtcatttttgttacgccagccagcgtagcgatatcctgtaaagaaattctgtgattgcgcataacttctcccaacgtcgggggaatcttcaatcttcccccgaaactacatcacaatattttattctttcagtgcaatacggcgttaatggctaacacgcccagcaaacccataatagaaataagggtttccatcaccgtccaggtacgcaacgtttcaccaaccgtcagattaaaataccctttaaatagccagaagccagggtcgtttacgtgtgacgcgatcacgctgcccgcaccggttgccagtaccattaaagcgggatcggcatgggtaacgttgataatcggcaacaccacacccgcggtggtaatggccgcgacggtggcagagcccagagcgatacgcaacagcgccgcaacagtccagcacatcaataacggcgaaagtgtagttccggtcattaagtgtgaaatatagtgcccgacaccgctatctactaatacctgcttaaacgcgccgccgccagcgataataaacacaatcatcgcgatagcgcctatagaatccccaatgatatccatgatttgctcgatggtgcgtccattacgtcggcccagtgtgaaaatcgcaataacaatggcaataaacagcgcaacggcagggttaccgacaaattcaaagaagaggcgcacggtgttagttttcggtaacgtaatttcacaaacggcggcgatagccatcaggatgaccgggatcacggcagcgaaaatactgttccagaaggagggcatctcctcttcgctaaacagatgaggattaaataagccttccggtggtgctttctcaaagcgagttagcagtttagaaaacagcggtcctgcgacaataactgtcggaatggtaatgataaatccatacagtaaagtcgttccgagattagcctcaaagatagtcgcgatggcagtaggccctggatgtggcggcagaaaacagtgggttacagagagcgctgctaccattggtacgccaacatacaacaggggtaatcctgatgatgctacgatggtaaataccaacggcaacagcaggacaaaacccacttcaaaaaacatggcgaggcccacaaccagaccggtgatcactagcgcccattgcacgcgttttttaccaaaagtagcaatcagcgtagtggcgatacgttgtgccgcacccgtatcagaaatcagcttgcctaacatggccccgaaaccgaggatcattgccagcccgccgagcgtgctgccgataccattttgtatagagtgcaggacggcctgtgcatccatcccttcggcaaatccgacgacggcagctaccagaacgagggcaataaagccgttaactttaaagccgatcatcaggataagaagcagcgcgacgcctgccgcaataatgattaatggcatagtctttatctcttattagtgccagaaaagcagcgctttcgcgctgcacgtaggggggctgttaaacagccactaacatgccgccatcaacaaacaacaggtggccgtttacgaaatcagaggcttttgaagaaaggaacaccgcagcaccaatcagttcctgcggatctccccagcgtgcggcgggggtccgtttgcacaaccaggcggtgaaggcttcgtcctcaaccagtgctttagtcatttctgttttgaaatagcccggcgcaataccgttgacctgaatattgtggcgcgccagctcgacgcacatgccgcgggtgagcatttttaccgcccctttcgatgcggcataaggggtgatggtgtcacgtcccagttcgctttgcatcgagcaaatattaataactttacctgccttgcgttcaaccatgtgacgagttaccgcttgcgataccaggaacacggcggtctggtttactgcgatcacatcattccactcttgttcagggaactcagtaaaaggatgacggcgctggataccggcgttattcaccagcacatcaatggggccgatgtccttttcgatatgttcaacggcggcatcaatttcatgtttatgagtaacattaaaaggtgcggcaacggcctgaataccctcctggtggagtttttctacagcaagttctgcgcgttcggcagtaatatcattaataattatttgtgcgccatatttacccaggccggttgccagtaaaaagccaatgccctgtgctgaaccggtaatcaagatattttttcctgccagtgaaaatagatcgttcattgtattattcctttatttatctcttagaaaacaagctggacttttgctgcctgggttttatcaccggcgaaacgtagcgcctcttccaggtcagtgaagggatattcagcactcagtaaaggcagtggattgataacgccattcgccagccatgacactgcggtattaaattcgctggtaaaacggaaagagcctctgagtgaaatctccttaccaatcaacgtcatcattgggaattctgccatcgcgcctcccatacctacctgcaccattacgccgcgtgcacgagtgacctccagacaggtattcactgatgaaggatgaccggacacttcaaagctgacatcgaaatagcctttttccgctttccagtgatccatgtcgtcgttttgtgggtttacgagcacatccgcccccatctctttgcccagcgaaagggaacggggactcacatcagcacagacaatttccgcggcccccagtgttttcactgcactgacaatcaggcagccaatgggtccaacaccggaaataaatactcgcttgccctgtaactcgccggcctgatgtgcggcatgaatcgcgacggctaaaggttcggcaaaagccataaccttttcgtcagctttggccggataagggacacattgcgacgtttcgaccattttataacgggtaaaaccaccatcaacatgagggaaatacatggcactgccaaaaaaacgcatatctgtacactgattctcgttatgttcaatgcagtatttgcagtgaccgcacggtttagacggattaatggctaccgtttgcccttcatgtaattctgatgagtcgctatgaataactttaccgataacttcatgacctaacaccatcggtgcctttatcatgaaattacctacttttccttcctgataataatgtaaatcggaaccgcaaattccacctcgggttatttgtactaatgttccattattattccaatctatcgtctgctcggtaacggcaacagttttcttgcccgcaacaacgcaggactgtgttttcacttgcataaattcctcactggtcaggtagacacctcggaagcatttaagcggttttaactgtcattatttgtgatgaagatcacgtcagaaaattgttacattactatgttacgcataacgtgatgtgccttgtaattcttatcagtagaaataaaaaaacgtgaaattattatgccgccaggcgtagtatcgcagcaggtaagatgattcaggagattttaaatggcgggtgaaagctttattttgatgggcgtttcagggagtggtaaaacattaattggtagcaaggttgccgcgttattatctgctaaatttattgatggtgacgatcttcatccagccaaaaatatagataaaatgtcgcagggtattccattatctgatgaagatcgacttccctggctggaacgcttaaatgatgcttcatacagtctttataaaaagaatgaaacaggatttattgtctgttcatcattaaaaaaacagtatcgtgatattttacgcaagggtagcccccatgttcatttcctctggttagatggcgactatgaaactattctcgcgcgaatgcagcgtcgggctgggcattttatgccggtagcgttactaaaaagtcagtttgaggcactggagcgtccacaagcagatgaacaggatattgtgcgcattgatatcaaccatgatattgccaatgtcaccgaacaatgtcggcaggctgtgctggcgatacgacaaaacagaatatgtgcgaaagagggcagcgcctcagatcagcgctgcgaatgattttcaaaaatcggctttcaacaccacgcggtaacgcgccttaccgtcgcgcacatgctggatggcgtcgttaattttcgacatcgggaacagttcggtggtcggcgcaaccttgctgcgggcggcaaaacgcatcagcttacgcagctcataaggcgtgccggtagcagaaccagagacgctgcgatcgcccgcaattaacgtaaaggccggaacagacagcggcgtgagaaccgcaccgaccgtatggaaattaccgccataggtcagcgcctcaaaatagggctgccagtcgaggctgacgttgacggtgttgataatgagatcaaactgccccgccagtgctttcagtgcctgcggatcgcggctattcaccactttatcggcacccatcgccagcacttcctgctctttcgccggattagaactaaaggctgtcacctcgcatcccattgcgtgcagaagttttatagcgatatgccccagcccgccaataccaattaccccaacgcggctggtagcagtgatatggtgcatcaacagtggtttaaagaccgtgataccgccgcacaacagcggcccggcggactcgatatcaatattttctggcagtggaatcacccattgccagtccgcacgcaacttctcggcaaagccaccgcgattcataatcgtcggcaccgcaccttgctcgcagttgatctgattaccgctaatacaggcgtcgcagtgaccacagctacgcgccgtccagccaatcccgacacgctgaccgacctgcaaacctttatcctgcgcggcgctcccgagtgccaccacgcgcccaatcacctcatgcccggcaaccagcggatattgtgaaaatccccattcgttatcgatcatcgacagatcggaatggcagatcccgcagtaatccacctgcacttcaacatcttgtggcctcagctcaccgggatcgtactcataaacttccagttcgccgcccgcttcttttgcggcatagctttttatcatcgacattttttggtccttctctggtgttgtttgggaagtgtagagcatggcagggcggggtgcctggagtgtgacaaaggttacacatcgctgtatgcaatgctgaaaatttcagcacttagcgaggtgcgagcaagctggcgcttgcatggtggcgtgcgacaggtataatccacaacgttttccgcatacctcttcagtgccgaagtggcgaaatcggtagacgcagttgattcaaaatcaaccgtagaaatacgtgccggttcgagtccggccttcggcaccaaaagtatgtaaatagacctcaactgaggtctttttttatgcctgaaatccagtgtttatctatctttcccgctatattaactctctcaaggtcaaccgatatcaacgtacatctaccaacatatgttggtacagatgatggtatttccggttcgataatgcttgtaccaacagggagggaatacgatggcattaacagatatcaaagtcagagcagccaagccaacggataagcaatattagctgactgatggtggcggtatgcatctgcttgtccatccaaatggttctaagtactggcgtttgcagtaccgttatgagggaaagcaaaaaatgctggcacttggggtttatcctgaaatcacactagcggatgccagagtacgtcgtgacgaggcgcgtaagctgcttgcgaatggcgtcgatccgggagacaaaaagaaaaatgataaggttgaacagagtaaagcacgaacctttaaagaagtcgcgattgagtggcatggcaccaataaaaagtggtctgaagatcacgcccatcgtgtgctaaaaagtcttgaagataatctttttgcagcgcttggtgaacgtaatatcgctgagttaaaaactcgagatttattagcacctattaaggccgtagaaatgtctggacgtcttgaagtggccgctcgtcttcagcagcgcactacagccatcatgcgctatgcagtgcaaagtgggttaattgattataacccggcacaagagatggctggggcggttgcttcctgtaatcgacaacatcgtcccgcgcttgaattaaagcgcatccctgagttgcttacaaaaatagatagctatactggtaggccgctaacccgatgggcgatagaactcactttgctgatctttattcggtccagtgagctgcgttttgctcgttggtcagagatcgatttcgaagcgtctatatggactatcccaccggagcgggagcctattcctggagtgaaacattcccatagaggctcaaaaatgcgtacaacgcatctagtgcctctttcaacgcaagctcttgcaattttaaagcagataaaacagttttatggggcccatgacttgatatttattggtgatcacgattcgcacaaacccatgagtgagaatacggtaaatagtgcgttacgggtcatggggtatgatacaaaagtagaggtttgtggtcatggctttcgaacaatggcctgtagttcattggtcgaatcaggtctgtggtctcgtgatgctgttgaacgtcagatgagccacatggcgcgaaattcagtgagggccgcgtatatccataaagcagagcatctggaagaacggcgattgatgctacagtggtgggccgattttctggatgtaaacagagaaaggtttatcagtccatttgaatatgcaaagattaataatccattaaaacagtaatcatcccgggcaaatgcccgggaattattctaggattattttctttgttaaaaaagacaaacggtattaactgatgtatttactatttaccgctccctgcaggggggattatcagaatccgcggttattcattatttatatacattcaataaaaaagtaacctcataaaaaatcctgtactcacagggtgatgcgggataactgacgtaaggagtgctgcagggatttgatggtcccttgtagactggccccctgaatctccagacaaccaatatcacttaaataagtgatagtcttaatactagtttttagactagtcattggagaacagatgattgatgtcttagggccggagaaacgcagacggcgtaccacacaggaaaagatcgcaattgttcagcagagctttgaaccggggatgacggtctccctcgttgcccggcaacatggtgtagcagccagccagttatttctctggcgtaagcaataccaggaaggaagtcttactgctgtcgccgccggagaacaggttgttcctgcctctgaacttgctgccgccatgaagcagattaaagaactccagcgcctgctcggcaagaaaacgatggaaaatgaactcctcaaagaagccgttgaatatggacgggcaaaaaagtggatagcgcacgcgcccttattgcccggggatggggagtaagcttagtcagccgttgtctccgggtgtcgcgtgcgcagttgcacgtcattctcagacgaaccgatgactggatggatggccgccgcagtcgtcacactgatgatacggatgtgcttctccgtatacaccatgttatcggagagctgccaacgtatggttatcgtcgggtatgggcgctgcttcgcagacaggcagaacttgatggtatgcctgcgatcaatgccaaacgtgtttaccggatcatgcgccagaatgcgctgttgcttgagcgaaaacctgctgtaccgccatcgaaacgggcacatacaggcagagtggccgtgaaagaaagcaatcagcgatggtgctctgacgggttcgagttctgctgtgataacggagagagactgcgtgtcacgttcgcgctggactgctgtgatcgtgaggcactgcactgggcggtcactaccggcggcttcaacagtgaaacagtacaggacgtcatgctgggagcggtggaacgccgcttcggcaacgatcttccgtcgtctccagtggagtggctgacggataatggttcatgctaccgggctaatgaaacacgccagttcgcccggatgttgggacttgaaccgaagaacacggcggtgcggagtccggagagtaacggaatagcagagagcttcgtgaaaacgataaagcgtgactacatcagtatcatgcccaaaccagacgggttaacggcagcaaagaaccttgcagaggcgttcgagcattataacgaatggcatccgcatagtgcgctgggttatcgctcgccacgggaatatctgcggcagcgggcttgtaatgggttaagtgataacagatgtctggaaatataggggcaaatccaccttgtgctgatatgaatacggatattttatacagaatacttttcagtacaagcgactgtattacagtctgccatatatgattacctgtgatcaggaagaataagtggctgaggtttcaaactgtctgccggtatattcctctctcccttaaaaaccataacaggttagttatcttcgtctgtcagcggattgaatggcggtatattttcagtacaaataccggtcatccactgaaaaatacctgcgaaatgacgggcactgatttttctactgacgggctgatgagacgttatgtcactggcggtaataatcagtggcacactgtagcctccctgcacatgaccataatgatgaacaggattggcactgtcgctgaccgacagcccaaggccagaaaagtaaagcatggcgaaatgacgtgagtaccggcgaaggataccatcaagctggccaagaaagttatccagtttactgatgctggcgaggtaacaggcaatttttcggggatactgctccaggtaattattcggctaggagttaaggctgtcacacggatttggatgagaacccatcatgtgcaggaaaattatcttcggagaggatgtatccgccagcgcacgttctgtttcctgtaacaacagtttgtcatctgttttacgggaagcgaagctgcctttcttgaggaaagtggcatgctccgcatcagaagcaataacagagatgcgtgtgtcatgctcccccagttttccttgattggatatccaccatgtgctgtatcctgcttttgctgccagcgccaccacattgttgccggaatcagggttctgctcatagtcataaatcagtgtccggctcagggaagacactgtactggaggctgtcgaggtataatcgtcaataaataaaccgggtgccgtattcagccacggtgtggttggtacgggatagtcatacactgacatataatccctgcgcacactctcaccagtgacaataacaatcgtatcatataacggtgctcccggctggattttccagttgtcagccccgtgctactcagttgttcataacgctgcatttcacgtaatgtgtcagttgtccccacaactgttcctttaaccatccgcaatggccaacggtttacagagcataatacgaatagccgtagagccagccagttacggtggtcgcgatggtgtgtccgccagaaaatcaccacgaataccagaatcgcggcactgaccagaaaatgataaacaggaaacacggggcggttcactttgctttctcctgtagtgttttctgtaggttctgaaccggttctagcggggttgtgaggctgatggcaatcgccgggctcttcctgcatgttacactggtactgcaagagggggccttcgctcctctgacattactcagtattttcactactacaccccatctgccatccataacaaccgattcaccccctcgcgaggcgttgttgcccgtcacccggacagacaccgttatggacttctcttgttgcacgatcgatcaattgttatgcatgctgacaccacaaccccggtgggtatgaccgatgcctttctcactctcttcccggtcatcgtcggccttccccgttattgtggcgtgtcagcaccctcgacggcatttcgatggctgctcagtgttcactcacgttacggcccgcataacccgttgacttcctgaagaagtcgtttcagggagagattcagcccttttgttacctcctggaccgcttcttgtccttccagtcggagcgagagttagccggggcggactttcaccgacggaaagatcgtgcatttcaaggcacacacaacaatatctgcgagcgtgctatccgtccggtcgttatgggacgaaaggcctggttgttcgctggttcactggtggccgggaaccgcgcggcacagataatgagccttctgggaaccgcagtctggagccacatgcttggctgacggacgtcctgacgcgtctgccggagtggccggaggagaggttggctgagttactgcctcttgagggctttaccttcttcgggtaagtgatacctgccgtcaggtgtttgtgcaccgggccataacctgcagttgggaattgaacgcctgacaacaggaaatgagctagagcagtaaacacgcgggctgacaatgggtcagaatatgagttagcccggcgttattcctggggtcagtacttcagatctagcctccggtaccagactagctagcccctacgcaaccaaataaatcaaccatcgtcagagtgcaatcgttcatatacactgtcggtgatgcgctaaaaaatgcgttaatgttgagttcctcgaacccttaccaattaagggacatagccagatacgcaactggctgatgcaagcagtctaatgtctttagatccgctggcctgcgggcatgacaatgtcaaacagtcaaagattgtggcgttgacggtcagtcttggggacaaaaaagctcagtattctcgttggcaaccagataatttaacagttgatgctgaaacgaaataggcatcttggttctgtaatgccagtcagttaagcaactgactggctctttttcggggctgtggggtatttccagggcctctcctttaccactctcgggaaggccctttcccttcttgtcggtaatttcacaagttgtcccatacttgcaagatcgcgcatcagctccggtatacgtcccggtgaagcgccctgcaatgtcatcagcattctcatcaccattccgcatgattctgagaaactcagttgattcggccagtaacctttcagatgttccgccattttaatcatctgatatctcaccagattataagccagtaagacaccccacagctcttgctccacaagctccggctttttacttctcagcgtcagcctgctccgttgcatcgtctgttttatctccctgtatcccagttcgatttcccagcgatgactgtacagatcccccatttctcctccggggaagcgcatggcgtccgtcatcgacgtcagcagatggcagacttttcctttgcgcgtcacggtcagcaggcgggcagtcacttcatttcccagtcccggccacttttttcgtgcctgcgggctggttttcagcttcaccagatgatcgcctttacccagttttctgatctcttcatattgcgctccctttctgagaggtatcatccagtggcggtgttctcccgccaggctccaggcatttaacagtcccagtgagtaataacctttatccattaacgtcagagtgttatcgccggtttgttctataagttgctcagcaagctcattttcgctgttcttcatcgtgccgaaggctgcagccgtcagcagatggctggtcagttccatctggcagaccattttgacctgcgggtagagcgccgggttcccggcatgtgtctggcgggggaaggctgcatcgttctctggtgtatccggtgtgcgccagaacacaccatcgatggccagcagggtcaggccgcaccagtgcggatgcggcgtggcgttatgccagagctgcgctgttttcgtgaacacgcggcggacagcctcacttcccaggcgctggcgggcctgaataacggcactgggggcaacgaaggggcgattgcccggcagcatgatgtccaggcgattcacaatctggtgaagaggttctttacgctcaagcgccatgccaacaatacaccagaccatcatttcgaggggaagacggcgcttgcgtagcgttacagtacctgattcggcaaggcaacgagagatgagttcggggtcgaggtaatcccccagagaagtcagtgggttacgcagagaatcgtaacgggataccagatcaagagcctgtccaatgtgcataaaaaaatccggaaacaagtgagcgtttccggattcttacacagccactggatcggtcaactgatccttaactgatcggcattaatcttggttctggtgtttgtaacaaactatcagctacaaaaatatgctcaatttgtgacatcagtaacaaaacgcgttttgttatgtggattgcttgttttttgatctggtataacaggtataaaggtatacagaaaagcaaagaaatactgcaaaggaaaacagctataacgtaagctaaagtaataacctctcagtctttcctcatttgacgaagggagttttattcaacctgaacggactacgaaaatgagcacaatgaataagtcaatttttgaagcagggttgaactgtgccagtggtggaatatctggcgaacattgttttttgttggtgacccaaaactgtaggtgggtatcagttttatctttcatagagtgaaatatgttaagaagaaatggaggaaaagattgtactgattaggtattgataacaatcaatagtactggcgtatttgaagacaatataattatttctggatattgttgaggctccctaatatttactttaagggctatattagaataacacaggaaacaaatatggcaacagcatggtataaacaagttaatccaccacaacggaaagctcttttttccgcatggcttggatatgtatttgatggctttgattttatgatgatattttacattcttcatattataaaagcagatcttggcattacggatattcaggctactttaatagggacagtggccttcatagccagacctattggaggtggtttttttggtgccatggctgataaatatggtcgtaagccaatgatgatgtgggcaattttcatttactcagtcggaacaggccttagcggtattgctacaaacttatatatgctcgcagtttgccgttttattgttggcttagggatgtctggtgaatatgcatgtgcttcaacttatgcggtagaaagttggcctaaaaatcttcaatctaaagctagtgcttttttggtaagtggtttttctgttggaaatattattgcggcacaaataatccctcagtttgctgaagtatatggatggagaaactctttttttataggcctgttaccagttttactagttctttggatcagaaaaagtgctccagaaagtcaggagtggattgaagataaatataaggataaatcaacatttttgtctgtcttcagaaaaccacatctttcaatctctatgatcgttttcctcgtctgtttttgtctatttggtgcaaactggccgataaacggactacttccttcctacctggcagataatggagttaatacagtggtcatttcaactctgatgacaatagcaggtttaggaacactgacaggtacaatattttttggttttgttggtgataagattggtgtaaaaaaagcctttgtagtcggtctaataacttcatttattttcctttgtcctcttttttttatttctgtgaaaaactcttctcttataggattatgtctctttggattaatgtttacaaatttaggtattgcagggttggttccaaaatttatatatgattactttccaacaaaattaagaggattagggaccggtcttatttataacttaggggcaactggaggaatggccgcacctgtattagctacatacatttcaggatattatggcttaggtgtttcattattcattgttacggttgcattctctgccttattaattttgttagttggttttgatattccaggtaaaatttataaactatccgtggctaaatgattggaggctttatgattaattatggcgttgttggtgttggatactttggcgctgaattagctcgttttatgaatatgcatgataatgcaaaaattacatgtgtatacgatcctgaaaatggagaaaatattgcccgtgaattgcagtgtatcaatatgtcaagcttggatgctttagtctcaagtaaattagtcgattgcgtgatcgtagccaccccaaattatctgcataaagaaccagtaattaaagcagcaaagaataagaagcatgttttttgtgaaaaaccaattgcattaagttatgaagattgtgtggatatggtcaaagcgtgtaaagaagctggtgtgacctttatggccgggcatattatgaattttttcaatggggttcaatatgcacggaagttaattaaagaaggtgttatcggcgaaatattatcatgtcatactaagagaaatggctgggaaaacaaacaagagagactttcctggaaaaagatgaaagaacaatctggtggacatctatatcatcatatacatgagttagattgtgttcagcatttacttggagaaataccagagacggttactatgattggtggaaatttggcccattctggtccaggatttggcaatgaagatgatatgttatttatgaccttggaattcccgtcaggaaaactagcaaccttagagtgggggagtgcatttaactggccggaacattatgtcatcatcaatggaactaaaggctctattaaaattgatatgcaagaaacagcagggtcacttaggattggcggtcagacaaagcattttttggtccatgaaacacaagaagaagatgatgatcgtcggaaaggcaatatgacctcagaaatggatggcgctatagcatatggtcatccaggaaaaaaaacaccattatggcttgccagtttaataagaaaggagacgttattcctccataatatcctctgtggtgcaaaacctgaagaagattatattgaccttctcaatggtgaggcggccatgtcggcgattgctactgctgatgctgccactctttcaagatcgcaggacaggaaagtgaaaatcagtgagatcattaaacatacatcagtaatgtaaaaactatacgcctcttgatttaattcaggaggccttttatgtatgatcaagaattttatcttcgataatctcataattttagcagtgccatttatgataaaaacatcccttaaaaccaatctaatctttttcttcctctgtgtatttgttccccatatggcgtcataatttacgctacgtaatacgggatagttacgatacgcagcgatagcgctaagttttagttaaaatcccccatcagcgggatatggggatctctgggaggttcaggttttagcatcgcgactttaatacgacagacgctggtgacgatgatgccaagtagtgactcttccgaataaggttcccactgaccaattggcgcgcgcttcgcaataaaatctcccttcgcccagtattgggaaaagtagatacattcaaactgtgtacgctgtttcgtctcacagttcacgacattgctggccgatgagctgaccattgggcctatccgggctgtcccgatggatattacgccgaagtatgtgggaattgccagcggattgatgaacgccggttccgctgtcgccgacattatttcacctatcgcctttggcattattatcgacaaaacaggcaactggagtttaccattctacggttccgtcgcattgcttgttattggtatattcctgacgttcttcatgcgtccagataagtcattgtaaaagtcgaatcagggctgaagtggcacactgaatttggccacctgaacagaggtgatatgctcacctcagaacaacacaggtgctccaatgaaaaaaagaaatttcagcgcagagtttaaacgcgaatccgctcaactggttgttgaccagaaatacacggtggcagatgccgcgaaagctatggatgttggcctttccacaatgacaagatgggtcaaacaactgcgtgatgagcgtcagggcaaaacaccaaaagcctctccgataacaccagaacaaatcgaaatacgtaagctgaggaaaaagctacaacggattgaaatggagaatgaaatattaaaaaggctactgtagattcaatctgtcaatgcaacacccctttcaattatctctttcggtgttttgaacttcagtgtctttctcggtctgttgtttagctgagcagcaaccagatctagttcatgttgagtatattgggcaagacatgtctttttaggaaagtactgccgaattagcccatttgtgttctcatttgttccccgctgccaaggactctgaggatcgcagaagtaaactttaacgccggtgctgacagtaaattctagatgtctggccagttccattcctctgtcccatgtcagtgattttctgagttctgacggtaaactcaggaatttgtcggtaagagcctgatttactgagacagaatctttgcccctgagtctaaggatgatcgtataacgtgattttcggtctacaagtgtggctatatgagagttttttgtacctgagactaaatcgccctcccaatgccctagagagcgtctgttatcgatatttcgggaacgttcgtgaattggtgttccgttcactatgttaatcgtacctctttcgcctttgcgggtatgacgcctgccatggcgaaggctatgcgaccgtcgcagatgctgtatattcaggtggtgtagcgcttcacggctacgaaagtacagcgttttataaattgtctcaggtgatattcgcagcgttttttgacgtggttttgttcgccttaaccatcctgatatttgctctggagaccatttcatctccagcttttccagaacaagctttcgcaatggtaaattttgatccagtaagcacggttttggccttttcgccattctgttggctcggttattagcatcaacagctttgtaatagcgtctgccccgattacgctgaacttcacgtgagatcgtcgaaggactgcgattcagcgcagtagctatcgcacgaatgctcattttggctgacaaaccagctcgtatctcctcgcgctcagacagtgtcaggtgagctacagcccgcttacgctcatggggttttatgccgccagtatcccttaacatagtgaagatcgttccgggttttgaacccaggatattcgctatttcactgaagcctgttccgttcttccatagttcaaaaacagaggctttttcctctgctgtaaatgttcgtctcattcaaaaaacctccgcaaccccatgttttcacataactgttgcgttgaccaattgaatctacagttgctttttttaatatatctcgctcaaggcgagcttcatttaacgccttacgcagttgcagaatttcagattccagttcagccaccgtgcgggaaccaggagtaccgagcccttttctggcggcggtaacccattgtcctaaagtgccttcaggaagagataatcgggaagcgccttcactgatcgaaagttgattttcaagaaccgttctgacagcttcggctttgaactttttagagtaacgttgggtttttctgctcattattagctccttctgatgccattctatttcaggaaggagtgtccgttaaactcaggctacctcaggaaaaaccgtcctgaaaaaccagacggcagacgggctgtattacgcagtcaggtacttgagctacatggcatcagccacggttcggccggagcaagaagcatcgccacaatggcaacccggagaggctaccagatgggacgctggcttgctggcaggctcatgaaagagctggggctggtcagctgtcagcagccgactcaccggtataaacgtggtggtcatgaacatgttgctatccctaactaccttgaaaggcagttcgccgtgaccgagccaaatcaggtgtggtgcggtgatgtgacctatatctggacgggtaagcgctgggcgtacctcgccgttgttctcgacctgttcgcaagaaaaccagtgggctgggccatgtcgttctcgccggacagcaggcttaccatgaaagcactggaaatggcatgggaaacccgtggtaagcccgtcggggtgatgttccaagcgatcaaggcagtcattatacgagcaggcagttccggcagttactgtggcgataccggatcaggcagagtatgagtcggcgtggaaactgctgggataacagcccaatggagcgcttcttcaggagtctgaagaacgaatgggtgccagcgacgggctatgtaagcttcagcgatgcagctcacgcaataacggactatatcgttggatattacagcgcactaagaccgcacgaatataatggtgggttaccaccaaacgaatcagaaaaccgatactggaaaaactctaacgcggaggccagttttagttgaccacaacagactacctgaagggagccgcggtcgcctggcagttgcagtagcaggagatcatccagccgcagtacaggtcacgatgactctggttaatgataccggctttgaccccgtattttccggctctatcgctgaatcatggcgtcagcagccgtgcacaccatcctattgttgtgactgggaggctgccaccatgcttcgcgctttccctctggcgaaaaagggagaaggacgggcccgtctgccttcactttatgccagcttcggtaagctgggtgagacaccgactcatgaagatatcattgataacaatcgatccatcaactggcctgtataacgtggctgccggtgattaagaaagctgcacctacctaagtagtagcaaacgcacactttttagaaaaatcgatggtcagaaactggattagcaattccgttccatggttgcttttgatttacgttggcgtctgatcattgatttatcctcaaaagcccaacctcattggtaatgaaccagctccgtgaatgtccgctctggcacagagcgaaattttttgatctcccccctgaaatctaaacttagtcatgtcacgtttttgggtttctaaaattttaacttcgcgtttttcgttgccgtaagggttatacagaaatgtccgttaagcagagttcaaaattgattgccgtgatcacgactggtttgaaagccgcgcccaagcctgtacagctctggtttgcgttgattatgaacctgtcagcctaaagcaagcggatggacgatgagtattggtaatctttcagagtccggaaaagttcagccccagtctgaacaggcttgctggcgccagtccagtttcattcagtcgtggtttggttcttacggcctgtgcaatctacctcattaggcacatcggcctgccagataccggctcggggtgtatttccgcttccacgctgaatactgttctcagcaatcctggggtcatcacctcttctggtgtgccttgcgccataacatgtccgtttgccattaccaccagttgatcgcagtaccggctagcctgattaaggtcgtgcagcacagcgaccaccgttttcccctgagtccggagttcgcccatcaaccgcatcaggtccacctggtgattgatatcaagataggtggttggctcatcaagtaatacaacgggcgtattctgggccaggaccattgccagaaatgcgcgctggcgctgaccgccggaaagctcggttaaccgacgaacggcaagatgattgatccgggtctggttcatggcgacattaactcgtgcattgtcttcagcggagagacgcccccagagtgacagccagggattacgaccatacgaaaccagctcctggactgtgatcccctctggcgttaaatggtgctgaggcagcagcgaaagcctgcgggccaactggcgcgatgagagcatatttatgggattatcgccgagaaatacggtgccagactgcggcattaaaagccgcgaaaaacagtttaacagcgtcgatttcccgcaaccgttaggaccgatcagggcggtgatcttccccgttggcagtgagagtgaaacgtcgttaagtaccttgtctgtcccgtaactgaccgtcagattttcagttcgtaaagtcatttatcgcattctcacaagcaaccagacaaaccacggcgcaccgataatggcggtcagcacgccaaccgggagctccagtgggggatgaataattctcgccagcagatcggcaaccaccaacagcaacgcacctgtcagggccgaaacaggcagcagtctgcggtgacgtccaccggtgatgctacgcatcatatgcggcaccacgagaccaataaagctaatcgggccgcaggcggccacgccggtagatgtcatggcgacagctagtaacaaagcccagaatcgggtatggggcaccgacacaccgagcgtggtggcgcgcgcatcgccgagtgcaaggaggtcgagatcgcggcaaaaactcaggctcagcggcagaaataaaatcatcagcgggatggcaatcttcacaaagctccagtcacggccccataagctgccggtcagccacagcagggcgttgttcacatcctgcgggcgcgagagcatcagataatccgtcaggctggcccagcatgcagaaagcgccacgccggtgagcgccagcttcatcggctggtgggtctttgccagcatcttcagcaatatcaaccccgccatgccgcccgcaaaggccagcagcggcagcaccatcacgggcagtgacggcataagaagtagagcccccacagaggccaggctggcggcatggttaacaccgagaatatccggtgatgccagagggttgcgcacaatcccctgtatcagcacgcccgccacggcgagggctgcaccgacaaacagtgccagcagcaagcgcggcagtcggtactccatcaatacataataatgctcgtgtccggcctgccagtcggtcagcagcgcgcgccacggcacggggatcactcccatatggagtgataacagcgcacagcccgccagggcaagggtgatgaaaataaccagcgcaattttcatcctcgcctcctcacaagccagacaaagcaagggctgccaatcagcgccagcactgcgcctgcgggcagatctccggggaaggccagcgcgcgtgcgagtacatctgccagcagcatcagcgtggcccccagcagcatgctcactggcagtacgttgcgctgatcgaagcctgcccagaagcgcgccagatgtggcaccagcagaccgataaacgccaccggacctgctacgctgacgcacgcaccaaccagaagcagcactaacatattgatgaccaaacgtagcctcgtcaggttcactcccagcgtatgggcggtgctgtcgctgaggttgagcaggttcagttgattcgccagcagcaacacgacagggactgcagtgaccaccaccggcaagagctgccagacatcctgccagcgggcgtgggacactccgcctgccagccagtaaaagatgccgtaagcatgatcttcggccagcagcagggtgatgcgggtaaggcccatacaaaaggccgacagcgcgatacccgcgaggatcagtttgtttctgtcatgggtatgacgaaatccgcctcctgcggtcatgaccagcagccagctcacgccgcccccgcatgccgcgatgaatgacagagaatagcctgcaatcggcgtcggactcagcgcgctggtaagcgccatagccagcgccgcgccgctgttaatgccgagcagtgaaggagaggccattgggttgtgggtcagggtttgcagcagcgtgcccgcgagcgccaggcttgcgccgatcagaacggcgaccaggcttcgtggcaaacgaaggttttgcaccagcgcttctggtagcgttggcgtgtgtccaggcagcagggcgcgggttgcatctgctccggaaacaggaatggccgagtagcaaaacagactcagccagaaaataataataagtgctgcaacgggaagcccccacagcagcaccgggtgttttatcgcggtcatttcacaacggtaagcggctgatggtggaagatttttaccgtgtcagcggcaatacgctctgcagcaaaaataccgcgcatccgcgcccaggtgttactgtcgaccgaagcaacctgctgcttctgcgcggcggttaacatctgccagagcggatcttgttgccagcgtttaacaatgctctcttcgcgatagtgggcaaccagcagccaggcaggattgaccgccagcagttgctccaggccgatggacggcatggacgcacccgccatcgcagcgggaacgttcagccccagagaggccagcacgctgccggtccaggtctcctgagtatgcaggttgaattgctgttcgcgtgatgtgccaaaggccacgcgtgtccctttgggaagctggctggcccactgcgccatcctctctttatgttgttccagacgtgcctgcatctctcgctttttacccaccatttcgccgatgatagccgcagattgcaaattttcagcgtaggtttcgttgcgggacttaagcagcagtaccggcgcgatttgctgcaaggcgatgtaaacccccgcatggcgactgctgtcggcaatgatcaggtctggtttcagagcggcaatggcttccaggctcggctgcgcgcgcgttccgacggactgccacggtttcaggtgcgcacgcacttcgggcaggatgcgttttgcatcgttatcgtcggcaataccgatcgggatgacgtccacggcggccagcgcatcggcgaacgagagttccagcaccacaatccgttgtggcgttttttcgagtgtaaacgtgccgtgttcgtcctgaaccgtggcggcaaaggcgtggctgatcaccagcagcaggcctgcaaaaagaaaacggataaatgccaacataatcacattccagctaaaagcccggcaagccgggcgttaacacatcagaacttcaacgacccctgcatatacagcgtgcgcggctggcctgcatagatgcctttgttgttgtcgtcataagagcggatgaagtagtcctggtcgaagatgtttttcacaccgaatgccaggttcagatctgccatctgcgggccaaagtcatacgccacgcgtgcgccccagagcatgaagccgggaatgcggccggtactgccgtcggcgctctctttcaccgtattggcgttatccgcaaactggctggactggaaatcgctgttcagattgaacgtccagtttcctggcttgtagtccacgcccagcgtgcctttatgtttcggggagaatggtaccagattgccgtaggtgtcgcctttctcgcggatttccgcgttcacatacgcatagctggcgtagatggaaacgttatcaagcgttggcgttagcgtacccagatcgtaacgtgcctgcgtttccagcccggtatggcgcgttttgccacgtgcagtgacggtgtcgttggtctggttggagtcgtactgattgttaaagttaatcaggaacagccccatttccgccgtcagcgcgccgtcgtcgtagcgggtaccgagttcccaggttcgcgctttttccggttcaacattgccgctttgcacagccttgccaatctggctgtactgtacggtgccgaacgagccttcagtgtttgcataaagattccagctgtcagtcaggtgatagagcacgttcaacgccggaagcggtgcgttatagctcacttcttcgtgcgtgcctgtgatggcgttgttctggtatgactcgatatgttcgaaacgcatacccggcgtgatggtccagttgccgatgtcgattttgtcatccagataccaggcgtgcgcctcggtgccggaacgcgtatcgcggtcgtaagggcttgagccggacggcaactgcccgctgctggtggcggtgtagtaacgcatttcatgcgttgattcattcaaatagcgatagcccacgcccacttcgtgcgcggaagggccgatcataaagatctggctgtagcgtggctcaataccgcgcacccagtagttacgcggcgagagggtgatgcgtttgccttgctccaggtagccgctgcgcagggtttgggtgtagaacccctgaatgttgaatttatgctggctgtctggctggaactggtagcccaggctcgccagcttgcgacgaccccagaagcggtcatacgggcgggtggattgccagcgatcggcgtcgtaatccgcgcgagacaggccaccgggcatgtcggcttcaccgtcgtaatattgcagcaggctgttgaaggtgtgcacctcatccggcgcatatttgcttttcagcatcaggtcgtcgatgcgggtggcgctgtgctcgcgccagtcactgccgcgcgtgccggagtagagcagcgcggtgccaaaaccgttgtccgctgtgccgcccaccatcaggttgtgcgtctctttcgggttgttttgtgaagaggttgggctgagctgaccttccacgcccgcctcgataccaaagtcctgcggaatggcacgggtaacaaagttcaccacgccgcccacgctctgcggtccgtaacgcaccgcaccaccaccgcgtaccacgtcaatggcatccatgttgccgagcgaaacgggagccagtgaaagctgcggctgaccgtaaggggcgaaggggacggggatgccgtccatcaggacggtcgagcggctggcgaggcgcgggttcaggccccggatgccaaagttcatcgccaggtcgtggctgccggtgccgttgttttccggcgcgctgacgccagggatgcggttaagtacctcacgcatggtggttgcgccggttttggcgaaatcctcacggcggatcacgtcacgcgcgccagcatgttcaaatacgtcgttttcacgcgcatcacccagccagtcgccgaccacggtcagggcatcttcttttggtgcgggcgcgggctccagcgtccagctgttatttcccagcggttttacctgcagtccgctgccgtccagcagttgttgcaggccgctctcgacgtcgtaatcgccgtgcaggccgttgctctgcttgccgcgcgtcaggctggcgtcaaccgagagggtaaatccgctgtgtgcggcatactgattgagcgctttatcgagcgatcccggtgcgatattaacctgtgcagcaaaagcggaaaacgagagaccggccagcggcagcaggctcaggcgaatggtgttaaccaaaggtgttgttttacgaaaaacgcgtaacggcgtcataccttccccatcatcatttttgttgtgttcagctatgagtcgaacgagaagggtaaaaaggacaatcgaaataagaattattttccttacagtggtgaaatgtttatccagtaccgcgtaatagactgaattttaacgggaagcgtttgcgcgataacgttcaggatcgcatcggtatttttcagcgggaacgtcccgctcaggcgcagcccggcaacggcgggatcgcagcgcagcacgccgttgcggtaacgggttagcgtggctatcacctcacccagcggtttatcgctgaagctcaggatgtccttcgtccagcttgtactctcgtcatccagcggtttcactgcgccaaactcagaggcgctgaactgcaggctttcaccagcgttcacgatgcgtttttgcgcgggggcactggcgagaagcacttccacagcgtgctgctgcacgtcaagctgcgtgaaattatcctgctggcggacggtaaattctgtccctaaagcagtgagctggccctgacgggtcaggacacggaaggggcgttgcagggcatctttcgcggtagtaatggcgatttcaccgtaccagagccggacggtgcgctgatgcgcatcaaaacgcacatccgccgcgctttgggtattcagcgtgagcagggagccatcttccagttgctgacggctgactgtgcctttggcggtgcggtaatctgcccgcagaccttcgccggtttccgactgccagagctgccagcctccgccagcgccgagcaacagcagtaatcctttcatcacgtgacggcgggtgaggcgggtatcgtgcaacgcccggctggcaacgtcgccaggcacaccgccaagctggttgcgcaggttttcaacctgctgccaggcccactggttatcctgatcctgttcataccactgttgccagcgcgcttcctgttgtgggctgacgcgctcgccgcttagcacggcataccagtgggaagctgaacgcagcgcctgacggcgggaatcggttaacaaaggattcataacccatactccagacggaacagcaggcagtgctcgacggctttcgccacgtattttttcacggagctgatggaaacaccgagtttgtgcgcaatctcgctgtatgtcagaccatccagttgcgaaagcagaaacgcttcacgtgttttgccgtttagcccgtccagcatgctgtcgaggagttgtagggtctcgagttggctttcgcgttcctcaggtgaaggcgctcccccctccggcataagcgccagcatctccagatacgctttttccagcgcgtttcggcgaaacaggtccaccatcacgcgtttggcgatagtgcagaggaaggagcgaggatcgcggatcgtcgagagcgtttcgctgaccattacccgcaaaaaagtgtcctgggcaatgtcatctgcatcaaaagcagactggagtttgcgcgtcagccagcttttcaaccagccgtgatgtgtgccataaagcgactcgaacgttaaggaagctgtggtagtggcgcggtcagacatgcggagtgcatcaaaagttaattatcacgtagtcatattaatatgagaatggttatcattacaattggaaataaaattgtttccaatagacatttttaacatgttgtttttctaagtgttataaggtaggtataaaatgggatggagcctctgcttctggcatgtgtcggtcagaatgactcatgatgtggtctgctattattgacatcctcactgccctaaaggatggggatttcggtaatgctgccaacttactgatttagtgtatgatggtgattttaaggtgcttgcgtggcttccatttccatcagatgtccttcctgctccgctactgaaggcgtggtgcgtaacggcaaaagcactgccggacatcagcgctatctctgctctccttgccgtaaaacatggcaactacagttcacttacaccgcctctcagcccggtaagcaccagaaaatcattgatatggccatgaatggcgtcggatgtcgcgccagtgcacgcattatgggcgttggcctcaacacggttttacgtcacttaaaaaactcaggccgcagtcggtaacctcgcgcatacaaccgggcagtgatgtgattgtctgcgctgaaatggacgaacagtggggctacgtcggtgctaaatcacgtcagcgctggctgttttacgcgtatgacaggatacggaggacggttgtggcgcacgtcttcggtgaacgcactctggccacactggagcgtcttctgagcctgctgtcggcctttgaggtcgtggtatagatgacggatggctggccgctgtatgaatcacgcctgaagggaaagctgcacgttatcagcaagcgttacactcagcgcattgagcgacataatctgaatctgagacaacatctggcaaggctgggacggaagttactgtcgttctcaaaatcggtggagttgcatgacaaggtcatcgggcattatctgaacataaaacactatcagtaagttggagtcattaccgaccatgtttatttcatacattgtgggtattgttcttattatcgccgctaatcaataaaatcctgccccatatctacatggggcagttgttcattcttttagtgtggtaattcacacgccagcaaaaactctgccgttccttcatcaacaatcaggtccgtgacatatcctcccagcagggcacccaacgttgcgtcatagcctctttccccaccagcaaggaagatcttccgttcaatctgccttagctgagccagactgattcccagaatacgctggtcaacatcagccacgacgggcatcccttccttgtcatagaagcgaccacaaatgacacctactgcgcctaaatcccgatacgtctgcatttccttcttattcagcacgcccacccgaatcaggggattttcatcaagcgcgttacccacgacaaaaaaggctttcgtacagcgagtcagaacgtcaaaattcgatcgaataataggctctgcctgtaactccatggccagtctggcgcttgataccacggcgggcacgtgcagcgaggcgacacggcctgaaagcttgtaggcgatttgcgatgaggattcaatgatcgtcaggtctggctgagatggcatggaaccgagcatctgtataacggtgacatttttacatgacttcggcgtcatggttttgctcatctgatggattgttcttccccaggcaacccccagcacatcaccattctcaatcacctgattcagatacatgccaccggcacgtgaaaggcgagtccgcatcagctttgtatcatcacgttttccggcatgttcgccatccggcacgatgatcactctctggagattgaatttatcgcgaatttgcaaagcagcgtcgatagagccaaagacattcacatccaggttgatatgaaccagtccattttcccgggctgtttgcaggtatttgacaaccgtgacgcgggacacccccatgatagctgcaacttcagtctggcttttgccttcctgatagtacagccatgttgcatgaagtacgggatcatcattgaacaggctgctgtttgtttgatctctatccacttttgtatacctgtattaaaccggggaaatgctcatcttaaccctgtttacccggagagttgatgcagattgccagtggcatgattttatacagatattttattcttttacatgaaataaaccagcataccatttgagcgatcgcccgctgttcccccatactgtaaagccggagacatgctccggctttacagtattactgagaatacacccatcaagcataatcgaaggttcaatatcgcccctttttgatcgccagcgattcgtcaccgtgcagacggttgccgtcactcactaaattatgggggacagtgaacaacaggttggctcactggcaagaacccgattataaaactaagctggcgagcagaataaaaatcagcccactgatggataagagtgtggacatcagcgtccaggataacagcgtttctttggtggtcaggccaaaaaagtctttaatcatccagaaactggcatcgttaacgtgagaacaaatacaggatccggcaccggtagccagcgtaatcaaggccaggttggtattgggatgtactgccaacaatgggatgaccagaccggcggtagagatcgccgcgacggtggctgaacccagacaaatacgcaggaatgcggccacgccccaggccatcaggatcgggttaatatccatacccgaaaccagggtggaaatatactgaccaacgccagagtcgatgagaacttgcttgaatgcaccaccaccaccgataatcagcagcagaccggcaatacccgcgatagcttttccgcaagaatccatcaggtcagggattgttttcccgcgccccaggcccatggtatagatcgcgaatagcagtgaaatcagcatggcgatcgttgaattacctaagaacagtatcacgttgtaaaataagcctgaatccgcggcacttttggcatgagtcatctggatgatggtgacaaccgccatcaggatcaccggcagcattgccgtgagaaaactgatcccaaagcctggcatttcgctttcgctgaatcggcgggtcgcgccgagagaggctatattcccctcttttttaaaggcgtccggaataatgcgctggcagaatttattcaataccgggccgcaaagaataaaggttggaatgccgacaatgataccgtatatcagtaccaatcctacatcagcgccatattccctggcgataacagtcgggccggggtgcggcggcaaaaaaccgtgtgcgaccagcaaaccagaaagcatcggcacacacataaacatcggtgatatttttgcttcacgggcaatagcgaataaaataggtaccagaagaattaaaccgacttcgaaaaaaagtgcgataccgacaataaacgccgaacagaccactgcccagtcaagtttatttttcccgaaataattcagcatggtcagcgctattcgctgcgcaccacccgcatcggccagcaagcgaccgagcataacaccgaagccaaatatcaaaccaatatggcccagcgtaccgccaagtccggattcgactgaggtgacgactttactcaaatccataccactggcgatggcgacagcaatcgagacaataattaacgaaacaaacgtattaagcttaatttttatggttaaaagcaggagtaaagcaatccctgccacaacgataattagtggcataacgtcctctcataacagggtagcgacccatcattatccgactgagcaaataacgaatgatgcagagtcggataattcaggtgtctggatgtttttatttatgctttcagtttttattcataaaatcgcgcaaagccgcgccaattttgtttacatcataaatacaaccggtccatgtcccaccactcacggcctgaagcattgcccatagccgggtatcatctggcaattcaggatcgggaagtaaatcctgatggctgggtctggcatttaatattgcagttgcctcctcctgtgaaggtaattgttcatcgctacgggttccgaggaaattgacttcgccgtgaagctcgcgacaatcaattttaatttcaattaaatccccggtgcgtaatttaccgatggggcctccggccagcgcttctggccccacatggccgatgcacgcgccagtagaaacgcccgagaaacgtgcatcggtgattaacgaaacatgcttaccgtatgacagatgcttcagggcactggtaacctggtaggtttcttccatccctgtacctgaaggtccaacgccaataatgaccagaatatcgcccgccttgatcttgtcatgtttgatatcgtaaatcgcacttttctcggacagataaaccttcgccacacctttatggtaatagataccttgctcatcaatcatcgaggggtcaatggcggtggatttgatcaccgaaccttctggcgcaatattgcccaccgggaaggtgatagttgaggttaatccgcgcgcttttgcttgctgcggagacatgatcacttcgtcagcgttgatttgttcctgatcgagcaggagttgcttgaaccgctgacgccgttcggagtgctcccaccagtcgaggttttctttcagcgtgctgccggtaaccgtcataacgtcttcatgcaacaatccgaggctgcgcagatgcaacatgacttccggcacaccacctgccataaaggcattgaccgttggatgataaaccgggccattaggcagtacgctcaccagtcggggcacgcgcttgttgatgcggatccagtcatcaacggtcgggatatggcaacctgcctggtgagcaattgccgggatgtgtaacagcaggtttgttgaaccaccgaacgcggcatggaccgtcatcgcattctctatcgctttatcggtgagaatttcccgggtggtgatgcctttttgactcaggttcagcgcagctcgcgcggaagctctggcgatctcccgccacacaggctcaccggaaggggccagggctgaatgtgggattgccagtcccaatccttcggccaccacctgagatgtcccggcagtgcccaaaaattgacagccgccgccggaagaggcacaggctttacagcccgcacggcgtgcgtcctgtagagataattcgccattggcgaagcgtgcgccaatggtttgcaccttgccgttgtcttctccatcctttgcgggcagcgtcgcgccgccggggaccagcacggttgcgatgttgtgctgcgcggcgagtgccatcatggtggccggaagccccttatcgcaactcgccacaccaataactgctttcgcgtcgggcagagagcgaataaggcggcgcattaccatcgatgcgtcatttcggtatggtagcgaatcaaacatccccgttgtaccctgagtacgcccgtcacaaggatcggagacgtacacggcatagggcagggcatggttggctttaataacctcggccgccgctttcatctggatgtccagttcgtaatgcccctggtgcaacgccagcgccacgggtttaccgtctgcgccgcgtaagccaccgagtgtactgagcagtaaaataccgtcccgatccagctcgtccggagaccaacccattccggcattcatggtcataccgaacagatccccgctcgggcggttgataagcatctctgcggttaatgggagttcgccgtccgggccatcggcgtgcgttctgacggtgtaaatatcgtggctctcgtcagcaaaaatattgcgaacagacatgagtttctcctcagactggtaaaatgccctgcgcggtaagcagcacgtggactttatcttttgcttcttcagatgcttcaagaatcggtggtaagcaatatgtctctacaggcagcccgacacactgcatgctgtatttgatcagtgagacaaacggtgtttcgagggcgtaaatagcgggcagttgtagtagttttttattcagcgtcgcagcggtcgccagatcgccttcacgccaggcgcggtagatgccgacggagagttccggagcaaagttagcgctggcggttatcgcaccgtcgccgcccagcagcatcgtattcagcaaatgatcatcgtaaccgcagaataccgaaaacgacgggcgtaccgacttaactgtgttgatcatcgtacgcaagtgaccaacgctgtcgatggtgtctttgatgccaacgatattctcgttttgcagagccagacgcgtcacggtttccggggttaagtcctgacccgtcagatccggaaagttgtacaggatcaccggtagggtgacgctacgggcgatctgctggtaatagtcgtcaagatttcgtggtgcgactttccagtagtaggggttgatggcgacgataccatcagcgccgtaggcttgcgcatgctgcgccagtttgaccgcttcgtcagtggaaggggaaccgacgccaatcaataccggcactcgcccgtcgacaatggttacagcttcttcggcgagtgccatgcgctgggctgtattcatttggctaaattcaccaccggtacccagataaaacagcccgtcgacccctttattaatcaggaagtcggcaacttcgcgcattgcctttttatcaagggttccgtcacgatgaaacgtgctggataccggtggaataatgccgctgaattttttcattacctcagtttccttttcgtaagtgctcattttcgtttctgtatcccagcccatatgatatttgctcagcgcatttccggagcaattccagatagctgtctatcttatttcctgaataaactaccggatcgccagaaagtgagattgcatagttaactctgttatacatattgaataccggcatacttaaacataccgccccataggttgattcttcgttgtctatggcccatccccgaaggcgtgttttttgtaattcttccagaaacaattttttatcggtaaatgtattgcgcgtatgtggagttaacgtgagtgcttctaaaaaataatccagttcttctcgtgtcttccaggctaataatgccttacccaacgcggtaatatgcaactcaagttttttgccaatccagcttttgctcgtcggtacagagtccggactttcgatcttgtcgagatagatagccgaaatgctctccatcgccccaagatgacaaaccagtccacttttcagcgacaactcctgcattggccgcttagtcacctcaaatatattttgacggtgtaacgcctgacaacccaattcgtagttttttattcccagtgaatagtagccgtttttgtttttaattaagaaaccacaatccaccattacattcaataaattaagcaggctgcttttggggtactggaatttatttaataactccatataacttgccataccaacccatgcaatgtgggttaatattttttcagcacggactaatgaattacaccctttgcgaaccataatggctcctccttgctcatggaataaatggtatcggcattacatagtggaaaatatgctttgttcagcatgctgaaccgtaatgatgtgattaaatgtgatcttgtacacactttgaataatgaatccagaacagccacatttagtgaatgagaataaaaagtagatggcgtgttgttgcaacatcgtagtgtgtggattgcgcctagagcttctttattcgttcgagcgcatcgccaatattttctattgggtgccattgattatttttgcttgaaatccctctcgaatgaacttacttatcactttattgaatgaggtaaaaacaactgacatccggctcgctgataacgctgtgcaatagtctcaggtaacccgctgtcactgatgatcgttttaatacatgatagtgttgctacagcatgcggctcaacggcatcaaattttgagtgatcggccatgagaataacttcacgcgagcgttgaataatccgtgttttcaccccgacctcaaacatggtggcattggtgatccccgtctccagcgacagcgcatcgcaggagataaacgcacgttctacggaaaaggcattgatcatctccagcgccagactctctcctaccgaaaaataacctgggcgaatcagtcctccgataatgtaactttccacatggggaaaacagcccagttcattggcgattttaatgtcgttgcagatgacctttacccgcgcatcggccaggcatttcgccagttcgaggcaggttgagccggagtcgagaaaaaagcagtcgccatctttgatcattgttcgggcaagggcagctatttctcttttcgccacagattgcaatgtacgtttcacgtcgaagacgtactctttgtcgtctgtactgtcgtcgaagtccaggcaaccgtgaccgcggatcatgcctggatactggttgacaatatactggaaatcacgacggacagtcgcttccgcatagccaaaaagctccatggcctgctgtgtggagaggtgacgatgttgccacaggtagtgcagcatctgtttgatacggtcaggtctctgttggctcatcagaaacaatctcctcttacagggtggcgaattgagctaaggtcgcgcgatagtcagatgaagagaacagggcgcgcccaatcaccatatgttgcgccccagctgctgccagttgctgtgcagctgccagcgtaattccaccgtcggcccagcactcggtctgaggaaaagccgtgcgtactttttggattttctcgcacatggagggaataaaccgctgtccctgcccatcgggctcactggtcatcaccatcactccgtccagctcagacgccagatatcgccaggcgtcgatcggggttgccggattaaataccagtccggctcgtgcgccggtatggcggatctcagttaacgtttccgaaggatagtccagcgtttctgcatgaacgaagatccacgcgggtctgatttcagccagcgcgttaaaccagcgctgtggccgggcaagcatgaaatgaaaggacaagggatgaggcgtctgtctggcgacggcctgcaccgttttcatcccaaacgtaatgttgttaatgaagctgctgtcctcaatatccagatgcaggctcccaaaatccagattgtccaatgccgtcagctcacgaccatagtgcagaggatttgcgctggcgagagaagggtgcaggatcataagcgcctccgttaacctgataccagcgcaaacagtgcatcgtctgtgctggcatttcccactgccgttaagcgttgtggcgaatcaataaactggctgatgcgctgaatggtcaaaatatgtgcgttggcatccgtggcgctgacgcagagaagcagccagacggggtcgcactcctcgttaccaaaggcgaccggggtgcgtagcgtggtgatactgacctgattatagtttgcgccttgctctggtcgggcgtgaggcaaggcgattcctggggctatcagataataaggcccccagttaagggtattttcgatgatcccattaacgtagcatggctgcgcggcaccataggctaccagcgggcgggtggcgatttccacggcctgacgccagtcggtggctttacgttgtgcctgtacccatttaatatcgttaatcatccgtcgttgactccatgccgattcgggttaatctggtagcgatccccgtcgatacttttgacgaaggcggcagggatcgcagaagggttattgctctttgccggggataagcgctctgcttatccccatcttatcggcgtatatgatgcactttctccataaactgactgactcgcgcctggtcaacgaaattggcaaaaacgccgtcctttttaaaggtggttgcggtcacacagccatcggcgatactgagttgttcctccacgttttccaggcagacgcccgtgttggccaacacgacggtgtcaggcaccgtttctttgacccgttttaacagcgcgctgtcggtacgcgtcccggcggtcaggccagaaacacagagcgcatcaggatggttgttaaatactgtcgatttagcaatagaacagatatcgcgattgcccagatacacggcggcctctgggacgatattgaacaaggttttcacttcgcctgcaccaatccggtgttgatgacggatggtctcaccgacgttagtgtcccagacgccaaagtcgctggcataggcaccggtaaatatctcgcggataaacttagcgccggtagccatcgccaggtcgaatgaggcgaccggatcccacagaacattcacgccaaacgggatgcggatatcgctcattaattgcccgatgattcgtgccattgccgcagtggtttccggacgcaccttcgtgagatagggaagactaaactcgttggagaacatgactgcatccaccccaccattttggagcgccatcagatcgtcccaggctttgtcgataacccagttcatccccaactgcgcatcaaaactcgggtcgccgggcaatgcacgtagatggcacatggcgatgaccgctttttccgtcccaataacctctttcagccaactcattgaaagtactccttattccgataattcacgtttacgtaagaacagcacgacgctggcgacaataccgaccgccacgacaacgccaataatcccaagcgacatcaattcagaaatcgaccaaccgaacatattgcccacggacaacgctgagatttgcgcactttcaccggcaaaactgaaaccgcctttgagcgccatttcagtgaagtaaggcgcgaactgggtggcgatcagcaggacggtaatcatcacgatgaccccgcttatcaacgtcctgaccaggtctccgcggtggataaccgtagccatacagataaagaacggtgctaccggcaggtctgcgaggggtaacactttgttgcccggtaaaatgctggccagaattaacataatgggtatcagtagcagaccgacagcaatggtggttggatgccccagcgtcacagcagtatccagaccgatatacacttcacgtcctttgaaatatttctggaagaactttcttgcaccgtcggagatgggcagcaggccctcaacaatcaggcggatcatgcgcgggaacaacaccatgattgccgcaacggtaatcatcagactggcgcaacctttaaagccttcaccagccgccaggccaaaaatcagaccgagcactacgccgataatcaccggatcgccgaccatgccgtagcgtttctggatctcctgagcatcgatattgcgtcccttcatgaaagggattttttcatagatagcatcaagtagaacgaaaagcggtactgaactggaaccgtagccttgcggtatcgaaataccttccagcccgacgatgttctgtacccgttttgccgtccagtcggccatttttaacgatagcgccgcatggcagattgcccccagcacaccataaatcaggctaccggtcataagctggaccaccgtacccgtaatggcgtagtgccagtaattgtaaatatcgacgttcatcgttttggtcagacgggtgaccagcatggcgacattgagaagaaaaataactgggataatcatggcgccaatggctgtcgcataaccaacgccggaggcagggcctgcgccaacgtcaaagacatgcagggctaggccgaaacgctcaatcatcactttgatagggggactgaggctgtcgatcgccatgacgatcaccagtcccataccgacaaaaccaatcccaaccgttacccctgccttaatcgcctgcagccaggggatgcggaagataaggccaatcacgatcatgatgatagggacgaaaacggtaccgccgagagacaggatgtaatcaaacataatgcctccttttattgagttaacagagccttgatttgttgttttaacgcgtcgtcgttgatccctgtgagcagggcggcgccattaagcgtagggatgccgtaatcactgttggttcgcatggaggttacaataaggtccataccgttacagttaagagggatctcattcagacagcattgggcggtagtggctgaaatgccctgttcagtcaggaactcttgcagcttgtgtgcaatcatggttgaagtcgacatgccggtaccgcatgccacaaggatctttttcataatggatgtgcctcttgtgtagtgcctgaatcaggctcaacggggaaatgtgctgctgacatacctgccagagcggtcaataggcggatgcaatcagtcaaatcacgcaggctggcaacctccgccggagaatgggtatagcgacaaggaatagagagactggcgcagggaataccatcctgctcaacctggatataaccggtttctgttatcacgccgggagccacttctcgctgcaccggaatgttgtgttcaagagccgtctgttccaacatccgtatcaggcgaggaggcgtgattaatccggccagcgttccccgaccatggtagttcaggcaggtgatcccaacgccctgattaatcctgacctcggaataatcgtgtaaatcaggggtgtcacacgatggagtgatatcaataccaatcgccaggtcaggttttacacggcgtaatacgggaacaatgccgcggatattaaattcttcctgtaccgaagccaccagataaacggcgatatcaagctccatagtactgatagcatccgctacaccgagcagggcagtacagcctagacgatcgtctagtgctttactgcacaccagatcgtttgccaggagttgcggcgggttatacagagtgacaggcgtaccgacctgaatgcccatccgtatagcgtcgtctttgtctttggcaccaatatcaatccacagtttgtcgacagaaggtgactgcgtgcgctcgtcgcctttggcaaagtggtaggacttaatgccgatacaccccatgactggccctttgtccccggtgagggtgacgatggaaccagccatagtgacctgcgcaggaccgcctacgcgttcaaagcgtaaaaatccagacggctctattttgcgcaccataaaaccgacttcatccatatgcgcaaaaatcatcagtcgcagcgcatcgggtttatcactaccgtagcgcgcgacgacattcccaagcctgtctcgccagacctcttttgcctgacgcctgaattcgcacagcatgacgtcagcgacagcgttttcgtgtcctgaaatcgcattgtgctgcaaaagcgagaacagggtttcctgcacagaaaatgacatagctatctccgtagaccgtaaaacaatcactcgttgagcgttttataggcgcagactggtcgaataattgtgagaacgttcacgtgaaaacgcgcaaagctgaacaaataaaaaattatgtgagccgagtggaataaaagcgctcaacgtttgtgaaagttacgggctggagagaccagtgattatggttgaaataatgaggatgaataaaacgcggtaactgttatagcaccactttgttgcaggacgctccctcttcattacgtcctgcacgtggataccccagcatctccatcagcggatcttagaatgtaatggcgcgtggcaggtcgttggttcccagcataatgtaagaaaacatcggatctcctgaatagattcagagggagtatagataatcagctcaaatcactctccgctttatgagcccaggctggcattgccgtcagataacgttttgcacgcttatgtgcttcctccgggccgactttttgccaggaatcaaggaagctggctaaacctgataccgcttcttcccagggtttgagattgccgttgctgtcgctgcattacgcacaatattgatcactggcactgtgtgcatctggtgccgacatcggcattccgcaagcctgacagaactgttcatgttgtgacatatgatgctccttatggtgacatcttgattaataaacatactgaatatgtattgtgcaggtgatacatcagatcaaagcaaaggtaaagcctcgatatttccagccagaaataccgggaacctgttgttaccgggcgatgagtgcgaacacgccccagccaaagcattcccgcgcgtaggtcacgtagcgtttcggcgcgatgtttagttcggccctgacttcggcggcgaagtcatcgtcaggattcgcttccagccagcggcgcatggtcagccattttgcggcttcataccggtcccagccttcctggtctgccagtaccatttccaccacgtcatagccgagatcgtcgaacgctccgacaagtcctggcagcgtcaggaaatcgcttgtcgagctgacgccgcaggcctgggctatttcttctgttgctggtagctgacgccagtagggttcgccgataagcatgatcccgcccggtttcaggctttgcgctagcagctcctccgccccggcaaacccaccggcaatccatgtcgcgccgacgcaggccgccacgtcacatttttcatttgcgacgtaaccggccgcatcgttatgaataaaatgtacgcgttcgctgacgccgagttcttccgcgcgacgctttgcctgcgcggtgaagagcgaactcatgtcgatgccagtccccgtaatgccatgatccctggcccaggtgcagagcatctcgcccgagccgctgccgaggtcaagaatgcgggtgcccggcttcatgcgcagcacgcgacccagcgtggcgtacttctcttcggtgaacgggttatggatgcggtgttcactttcgctgatggtaaaaatacgtgggatatccattatttaattcctgttattgggttaagccttaaaaaggacacaacaagattgttattcacgtcagtgctccggtttcatcagggtctgcgcaccggatgtggccggtcagggtcatgggctgagcggtgagtgattgcatcatccagcaggctttgtgctcctccgggatgggataaggtgccggatagcctttgtctccggcacagggttcgaacccatgtcgggggtaataggtggcgtggccgagaacaaaaaccgtctggcagcccatcaacctcaggtgctcgatgccagtgcgtatcaaccgtcctcccacgcccatcccttggtattccggtatgaccgccaggggagcgaggatgtgcatcaacggtgaatccatttctcctttgaaggttgcccgggtaaataaaatatgcccgacggctttgccttcataccgggctagcagcgataacgcggggcgcgcgctttcatcctcaagtaaagaggccactaaatcggcttctttgctgaagccaaatgcgcgggtttcgacttcccggatatcactggcatcacttttatctgtgatatgaaaagtgaagtggtgtactgtcatagaaactctccttagcgattatcgagctgagcgcgaactttattcagctcggtggtgttgattcgatagggctggccattgacggacttgataagttttttggttttgagttttttgaagacggcgagcgtgcagtcggtcagcaacagcccttcgcggctgtagcattcaacggaagtgacgcggcctgaagaatcgcggacgtgcgcaatacgtctacctttagcgagaacgtgtaaggtatgttgttcctgacgggataaattcatactgaagaacctatttaatcatcatgtgcaaaacgtgcaaacacaccgcggtgtccgcattcgatttcggcgcattgataatcagtccggcctgaaaaggtcggggaactgattatcggatgattacattctccagcatcaaagcctcgggttgagttgaaaggtatttacggagcgaatattaacacgtagttataggagggatatgtttcagtagaaaaagtgtgatgtactttggaaattgaatgccaacccatttactggaaaaggcagatgacactgacgaatgcatgttgaagtacgcctgaaatggcctcatcggcttttcccttcgggagattattctccttttgttaaatccagaacataaatatgctcacccatcttcgatgcttgaaaaattgaagccaatcctgataagtaatttttttgaaagggtattttccggattcacaccggctttgatgagtgaaaaaccgttctcttttattcagtcaatcgtggcggtaattgcttcaattgcatatccctggcgagcataagcgggactgatggtatagccgagccaaaacacatcgcattgctgacgtaaatagatatcaccaatcaaaacctgcgtcatttgttgacaatggccaattgaatatcgcgagcaagtgtaagaactcccagcaagaccctgtaaataattctgtgtaactgcccacgattaaaggtggccgctcaggcggtcaccgtattcgataataaatgggtctggaaaaagtgcagcatctggcagcgtaatgcaggtagcccagttcaactctcactaccagtatgatcccaagttcgagcgcggaatgtatctgtatgagcatcgtcgctgtttcaataacatcatcgactactgtaactcactttgctatcacggtaagttgcagcctaaaagagggatggaaaaaggacgattttccccgcaatgggatatttacatattgatggtagaggcatgaagccaaatggagggagccgtcataaccctcttgaagctgaaacaatagcagcatggctggtggcacataaggatgatatagagcgccattacggggaaccactgtacaaagttgttggtgttgtgacgccattttcggcgcaggttaatgctatcaaaatgtcattgcgtaagctggaaattaatggcaaagacgagcagggtttactgacagtggggactgtgcactccttgcagggggcggaaagggcgattgttctcttttctcctgtctactcaaaacatgaagatggcaggtttcttgatagcaacagcactatcctcaatgttgctgtctcacgcgctaaagatagttttctggtatttggcgatatggaccttatcgagatgcagcccgcattttcgccgcgagggttattggcaaaatatctcttttcttcagataataatgcgttgcaatttgagtttcagaaacgacaggatttaatttccgcacatacacaaatttcaacgctgcatggtgtggagcagcatgatgaatttttgaacaagactcttgccggagctcaaaagaaaataacgattatttccccttggttatcctggcaaaaagtggagcaaacgggatttctggcatcaatggctttggcccgttcccggggcattgatattaccgtggtgacggataaaaactgcaatatagcgcatgtcgatgatgataagcgtcaggagaaacaacatctgctgaatgatgctgttgaaaagctcaataagatgggtatcgctacgaaattggttaatcgtgttcacagcaaaattgtgattgaggatgaagaactgctgtgtgtcggatcttttaactggttcagtgctacacgggaagataagtatcaacgatacgatacgtctttggtgtaccgtggtgaaggcgtaaaaaatgaaataaaggcaatatatggtagtctggatcaacgtcagctttaaatgtgatgagccgttcatgatacaggagtagtaaagggcatattttaccaatgttaaggcgactttccgttttattgcgagtcgcctttcctgattataaatcttattgtttacctaatcattttcctttgcataatgcgcctgggattaatggcgggtgcttttaggaatgaaagaaaatgcaagcaataatataataatggcctaatttctttgaacatcattaagcatatcatcatcgtctatttgccagaatccgtcgacttataatcgccagaacggcatatcaggacggtgctgcgaacgctgtggcccaaaacgttccagtaaactgtgtagatgttcgtagatttccgagccataatcgaaaaggcgcggatgtctattaaggcatccggctaatctgtaagcaataacaacggtttatgcggtgcgcgtttttcacccttgtgccagattattatattggcaattgcctgctgttcgagcccgcaagtgaagagatattaccttgatctcatttgttttttgttgtctactctgagaacgaacaaggacatcccccatgaataaactccccgctcacctttcgcgccaaaactgcaaaattgcttctacaaatctgtcagaaataatcccccgacgggctgcagtgctgaaatgactgcttcgcagtgccgtcgtccagttctccggtgaccggtacgctgaaccgtaatatcccgtgcttaaatcgtccgggtcttcatcaggcgcgttcgtcagtcctctttcaccttgttgctggaagtcgacgaaaataatattggctaaaacattattttgataattgccataaatagcttcatacgaatgcgggaaattttctttccagtaccaggtggtatcgccgcaaaaccacggcgcgtcagtaatattattaagctgagaatggtattgttttagatccctacgaaaggcttcaaccatatgattaaagtgttgagggtgtgacgcgtagtcactggtcattaagtcaaattcgccttgcatccagcatgcgccgaggaatttgttctgcggattttttgccagtgcggctcgcgttctgctgactaaatcctggtacagcggagtatccgttccccaacgacaagcatcatggctggctccgtgccgttctgaatatgtcccttcgctgcccgcggtaaaagccgatccgccacggcaacacggaacgataagaatccctgcattatcaggaatgaagggcagtaatttccgtgcaatatgcagtgcctggccaacggtgccgtactgtgtttgatgattcgttgccagaggatggtgataaccctgcatatcctgaacatcgtgtgggcagtgagtcagtggaataatgtcgttaaagtgacatggcgggcctccgggatgcgtatgcgcaaatctcgctaattgtttaattctgggatgaggcgcatcttccctgtccggtaatggcagtccttcgccatacgccatggcattagactgaccagcaacggtaagaacatagtaataatcgggcgatattattgcgttcatataaatttcgcgtaattgaaatgacaaattgatagcagggcccctttaccggggccctgaagcgttagttttgtactgtgactttattatccttcacagtgatcaaaactgaatccgtcaccgctttgccgcctgcagtttcaccgccaataatcaatagactattattccagggcaatgatactccgtaggcccgaccttgcgataattcacccgatttatcccatttcccgttatgccaaagatgaatatcagtgctatatgattttttcaggccttcatgcgcatagttcttaccgttctggtaattttctcgtgaacctttgaatccggcccctccggcaaatataagagaatcattgcttatccccgcaaaaccgccagctacgccatctggtgatgagacgggagcaagcttattccattttaaattattaccggtgaaatcaagttcaaatacggcatccgttcgcaatcctggtttggcttcgccattaataagccaggttttatcacctttattcacaaccgccgcaccagccgttccgtaccagggcgattcgccagcgtaactccattgctgtgttgagggatcaaaagacaacagaaacttattgaagaaataatcttctgcttttttgtcaaaatagtgagcattgattttatctatagcggttgaatcttttccagcctcgttgagatcttcaaaatagccattgaagatattctggttaacaccaccagtaacataagccttgccgttgtgtacaaaagtcacatggcccgccatgcccatcggcgcgtgcgacatcaatttaacccaactattggttttggggttgtatttgtgtacgtcattaaatacctgagtcaagccctcgctgtttttgccaatgccgccaaacacatacagattgccatcaataaatgcagaggttgcttgatctcttggtccgccagggaatgcagctaacgctgtccattttttatctttggcctgtgtatccagcttgtaccatgccgtacctgcgctacctaaaccaatgtagacagtgtcgttatcaattgctccggtaccacttttaaatggcacaggagtttccggtaatacagacgcgtttgcggcaaatgaagccatcatgatagcaagcgccgttattgttttattcattgtgactgtctcctgtctactacagtttaaatgacacaccaatgcgataactgttttccgataaattatctctgccgttgtaaacaccctgacggtcaaggtagtcatattctatgtatggcgtaatatcgggcgtcatatggtattgtagaacaaatgcattttccgtcgcccatttcttatggtttgcatagcgataatcgttctgtttgctgtatagcgtcgtttgccatgcgaaggtgaaatcactattaatatggtaagtgacatatccatcccaacgatgaacgttatcacgagacatatcaccggataagtcttgttgtcggtaagctttccagtcgtaacgatagcgaatgccaaaattaagatcttttgtcgcgtcccaggacagttttacgtagggtccgtagcgtgtgccgttgctgctaaaatgcgttaacattcccgggcgcaccgtccattgatcatcaagtttaatcgcgtaattaacttcaacctgaacatcattgagtgcggcattttcctttttattatcatgaatggtattccaggtattactttccatgcttgcccaccatccattttgccatccctcactgactttgagtcgagtctcataggcgtggcttccactacgatatccaccacgtacgtccagtgtcgcagcctgagaaattaatggggacgaaaagcacagtaataatacgccagaaagtattttagcctttttcataaatttcactcatttgtaggatacagaaagcaatacaaagcccgcataaacaattagcatttatgttgtgtaatatttttttgccaggcttatagtgtctttggcaaccggtagctgtattttatatttttttgtataaggtctcctgtgaaaaatctcttttcacattatttaaataaacagagatccagattaaatacctgagtataaaatctcttctgatgtttaattgatttgaatgttcgtaagctatatcacttactcaatccattttacccagagtcataaaatagaatgtctgttgatctcattttcatattcctttcagactgaagtgcgttttcatcacccgatgagaaagaactgaagtgatgtttgccatagattgcgagatgccctgtctcattgactatcttggtgcacctttatacctgttataccagatcaaaaatcacgcaatccatacaacaaaaccagatttgcaattcgtgtcacaaaatatgtcgatctttttctaagaggaagatgccatgtgaagccagacgaacacttgcggtggtcttcaaaaactaaagatcttagtttaactatttgttttataaataatttattaagagtctaaacaaggggagctttgcaagctaactcagtgagcttggtgaaaatcagtgtttacccgccatcaggctgagcataattctcatcatgaaatatgtttcctggtttgtggcttgtaactggtcacttctgaagtcgatctggagaggcttgttgatgttggtgttttcaggatgatgtttcacttagtttgtttgccgtatcgcccggcgaatggctgtgattgaggaaggtttaagtcgtagtgaccaaagctatatttaccaacgaatgtagatgaaaaaatcatctcctgcgttcccccatatctctaggataaaaaggaatgtaacaatctcatggcgtaagctgacgaatcagcaggaataatcgctagggacctaagaattagcatgataatagccactaagaaattactgcgctccatgaaatagccattttgtggcaaatggagttgactaataatgtcatatgtgagacggctagttgaacgaatattaaattttgctgaattttttatgttgattttacttgttacagaacatatcacatgatatatagataagattagttgcattaatgatgagggttattattagattcgtatccgattgataaatatataaaggtacatagcatgcaagagcatggcgtttgtatggcaacgttattataattaacagttgctactccatttaagttcactcagaagaactggtccacttacgttagttattaagcaaacgttcgcttttataaacataatcaggataaaaatgttggattattgctaacccagcacagctagtgcgcgtctgtaattataagggaaaaacgatgaagaataaggctgataacaaaaaaaggaacttcctgacccatagtgaaatcgaatcactccttaaagcagcaaataccgggcctcatgcagcacgtaattattgtctgactttgctttgttttattcatggtttccgggcgagtgaaatttgtcgattgaggatttcggatattgatcttaaggcaaagtgtatatatatccatcgattaaaaaaaggcttttcaacaacgcacccgctattgaataaagaagttcaggctttaaaaaactggttgagtatccgtacttcgtacccgcatgctgagagcgagtgggtatttttatcacgtaaggggaatccgctttctcggcaacagttttaccatattatctcgacttccggtggtaatgccgggttgtcactggagattcatccgcacatgttacgccattcgtgtggttttgctttggcgaatatgggaatagatacgcgacttatccaggattatcttgggcatcgcaatattcgtcatactgtctggtataccgccagcaatgcagggcgtttttacggcatctgggatagagccagaggacgacagcgtcacgctgttttatagagatagttgagataccagggatggtgttaaaaactacattattcttacgatatatcaaaaatgattaaccatttattaattgatgttattgtaagtgtgattcttaattatcataataaacattaagttaaccatatccatacaaaatacaatggtttatgttcttcaaaataaataaacaaaatcattcataaatttacacatcacttaaaatctcctgtttccgcacttttttctttattttttaagcaactggaagttaatccactgcaatctattgttatattgaatcaaatcaatgaaaatagatgttgtcacatcagtgatattttatttttgtatgatatttaatgtaattgactgatagccacatcactccgtgtgtggttatctttttatctattgggctaattttgaccgattgaggtttcctataggtattcattcaaatatatctcagttaggagtactactattgtgagtaaacgtcgttatcttaccggtaaagaagttcaggccatgatgcaggcggtttgttacggggcaacgggagccagagattattgtcttattctgttggcatatcggcatgggatgcgtattagtgaactgcttgatctgcattatcaggaccttgaccttaatgaaggtagaataaatattcgccgactgaagaacggattttctaccgttcacccgttacgttttgatgagcgtgaagccgtggaacgctggacccaggaacgtgctaactggaaaggcgctgaccggactgacgctatatttatttctcgccgcgggagtcggctttctcgccagcaggcctatcgcattattcgcgatgccggtattgaagctggaaccgtaacgcagactcatcctcatatgttaaggcatgcttgcggttatgaattggcggagcgtggtgcagatactcgtttaattcaggattatctcgggcatcgaaatattcgccatactgtgcgttataccgccagtaatgctgctcgttttgccggattatgggaaagaaataatctcataaacgaaaaattaaaaagagaagaggtttgatttaacttattgataataaagttaaaaaaacaaataaatacaagacaattggggccaaactgtccatatcataaataagttacgtattttttctcaagcataaaaatattaaaaaacgacaaaaagcatctaactgtttgatatgtaaattatttctattgtaaattaatttcacatcacctccgctatatgtaaagctaacgtttctgtggctcgacgcatcttcctcattcttctctccaaaaaccacctcatgcaatataaacatctataaataaagataacaatagaatattaagccaacaaataaactgaaaaagtttgtccgcgatgctttcctctatgagtcaaaatggccccaaatgtttcatcttttgggggaaaactgtgcagtgttggcagtcaaactcgtttacaaaacaaagtgtacagaacgactgcccatgtcgatttagaaatagttttttgaaaggaaagcagcatgaaaattaaaactctggcaatcgttgttctgtcggctctgtccctcagttctacagcggctctggccgctgccacgacggttaatggtgggaccgttcactttaaaggggaagttgttaacgccgcttgcgcagttgatgcaggctctgttgatcaaaccgttcagttaggacaggttcgtaccgcatcgctggcacaggaaggagcaaccagttctgctgtcggttttaacattcagctgaatgattgcgataccaatgttgcatctaaagccgctgttgcctttttaggtacggcgattgatgcgggtcataccaacgttctggctctgcagagttcagctgcgggtagcgcaacaaacgttggtgtgcagatcctggacagaacgggtgctgcgctgacgctggatggtgcgacatttagttcagaaacaaccctgaataacggaaccaataccattccgttccaggcgcgttattttgcaaccggggccgcaaccccgggtgctgctaatgcggatgcgaccttcaaggttcagtatcaataacctacccaggttcagggacgtcattacgggcagggatgcccacccttgtgcgataaaaataacgatgaaaaggaagagattatttctattagcgtcgttgctgccaatgtttgctctggccggaaataaatggaataccacgttgcccggcggaaatatgcaatttcagggcgtcattattgcggaaacttgccggattgaagccggtgataaacaaatgacggtcaatatggggcaaatcagcagtaaccggtttcatgcggttggggaagatagcgcaccggtgccttttgttattcatttacgggaatgtagcacggtggtgagtgaacgtgtaggtgtggcgtttcacggtgtcgcggatggtaaaaatccggatgtgctttccgtgggagaggggccagggatagccaccaatattggcgtagcgttgtttgatgatgaaggaaacctcgtaccgattaatcgtcctccagcaaactggaaacggctttattcaggctctacttcgctacatttcatcgccaaatatcgtgctaccgggcgtcgggttactggcggcatcgccaatgcccaggcctggttctctttaacctatcagtaattgttcagcagataatgtgataacaggaacaggacagtgagtaataaaaacgtcaatgtaaggaaatcgcaggaaataacattctgcttgctggcaggtatcctgatgttcatggcaatgatggttgccggacgcgctgaagcgggagtggccttaggtgcgactcgcgtaatttatccggcagggcaaaaacaagagcaacttgccgtgacaaataatgatgaaaatagtacctatttaattcaatcatgggtggaaaatgccgatggtgtaaaggatggtcgttttatcgtgacgcctcctctgtttgcgatgaagggaaaaaaagagaataccttacgtattcttgatgcaacaaataaccaattgccacaggaccgggaaagtttattctggatgaacgttaaagcgattccgtcaatggataaatcaaaattgactgagaatacgctacagctcgcaattatcagccgcattaaactgtactatcgcccggctaaattagcgttgccacccgatcaggccgcagaaaaattaagatttcgtcgtagcgcgaattctctgacgctgattaacccgacaccctattacctgacggtaacagagttgaatgccggaacccgggttcttgaaaatgcattggtgcctccaatgggcgaaagcacggttaaattgccttctgatgcaggaagcaatattacttaccgaacaataaatgattatggcgcacttacccccaaaatgacgggcgtaatggaataacgcagggggaatttttcgcctgaataaaaagaattgactgccgggtgattttaagccggaggaataatgtcatatctgaatttaagactttaccagcgaaacacacaatgcttgcatattcgtaagcatcgtttggctggtttttttgtccgactcgttgtcgcctgtgcttttgccgcacaggcacctttgtcatctgccgacctctattttaatccgcgctttttagcggatgatccccaggctgtggccgatttatcgcgttttgaaaatgggcaagaattaccgccagggacgtatcgcgtcgatatctatttgaataatggttatatggcaacgcgtgatgtcacatttaatacgggcgacagtgaacaagggattgttccctgcctgacacgcgcgcaactcgccagtatggggctgaatacggcttctgtcgccggtatgaatctgctggcggatgatgcctgtgtgccattaaccacaatggtccaggacgctactgcgcatctggatgttggtcagcagcgactgaacctgacgatccctcaggcatttatgagtaatcgcgcgcgtggttatattcctcctgagttatgggatcccggtattaatgccggattgctcaattataatttcagcggaaatagtgtacagaatcggattgggggtaacagccattatgcatatttaaacctacagagtgggttaaatattggtgcgtggcgtttacgcgacaataccacctggagttataacagtagcgacagatcatcaggtagcaaaaataaatggcagcatatcaatacctggcttgagcgagacataataccgttacgttcccggctgacgctgggtgatggttatactcagggcgatattttcgatggtattaactttcgcggcgcacaattggcctcagatgacaatatgttacccgatagtcaaagaggatttgccccggtgatccacggtattgctcgtggtactgcacaggtcactattaaacaaaatgggtatgacatttataatagtacggtgccaccggggccttttaccatcaacgatatctatgccgcaggtaatagtggtgacttgcaggtaacgatcaaagaggctgacggcagcacgcagatttttaccgtaccctattcgtcagtcccgcttttgcaacgtgaagggcatactcgttattccattacggcaggagaataccgtagtggaaatgcgcagcaggaaaaaacccgctttttccagagtacattactccacggccttccggctggctggacaatatatggtggaacgcaactggcggatcgttatcgtgcttttaatttcggtatcgggaaaaacatgggggcactgggcgctctgtctgtggatatgacgcaggctaattccacacttcccgatgacagtcagcatgacggacaatcggtgcgttttctctataacaaatcgctcaatgaatcaggcacgaatattcagttagtgggttaccgttattcgaccagcggatattttaatttcgctgatacaacatacagtcgaatgaatggctacaacatcgaaacacaggacggagttattcaggttaagccgaaattcaccgactattacaacctcgcttataacaaacgcgggaaattacaactcaccgttactcagcaactcgggcgcacatcaacactgtatttgagtggtagccatcaaacttattggggaacgagtaatgtcgatgagcaattccaggctggattaaatactgcgttcgaagatatcaactggacgctcagctatagcctgacgaaaaacgcctggcaaaaaggacgggatcagatgttagcgcttaacgtcaatattcctttcagccactggctgcgttctgacagtaaatctcagtggcgacatgccagtgccagctacagcatgtcacacgatctcaacggtcggatgaccaatctggctggtgtatacggtacgttgctggaagacaacaacctcagctatagcgtgcaaaccggctatgccgggggaggcgatggaaatagcggaagtacaggctacgccacgctgaattatcgcggtggttacggcaatgccaatatcggttacagccatagcgatgatattaagcagctctattacggagtcagcggtggggtactggctcatgccaatggcgtaacgctggggcagccgttaaacgatacggtggtgcttgttaaagcgcctggcgcaaaagatgcaaaagtcgaaaaccagacgggggtgcgtaccgactggcgtggttatgccgtgctgccttatgccactgaatatcgggaaaatagagtggcgctggataccaataccctggctgataacgtcgatttagataacgcggttgctaacgttgttcccactcgtggggcgatcgtgcgagcagagtttaaagcgcgcgttgggataaaactgctcatgacgctgacccacaataataagccgctgccgtttggggcgatggtgacatcagagagtagccagagtagcggcattgttgcggataatggtcaggtttacctcagcggaatgcctttagcgggaaaagttcaggtgaaatggggagaagaggaaaatgctcactgtgtcgccaattatcaactgccaccagagagtcagcagcagttattaacccagctatcagctgaatgtcgttaagggggcgtgatgagaaacaaacctttttatcttctgtgcgcttttttgtggctggcggtgagtcacgctttggctgcggatagcacgattactatccgcggctatgtcagggataacggctgtagtgtggccgctgaatcaaccaattttactgttgatctgatggaaaacgcggcgaagcaatttaacaacattggcgcgacgactcctgttgttccatttcgtattttgctgtcaccctgtggtaatgccgtttctgccgtaaaggttgggtttactggcgttgcagatagccacaatgccaacctgcttgcacttgaaaatacggtgtcagcggcttcgggactgggaatacagcttctgaatgagcagcaaaatcaaataccccttaatgctccatcgtccgcgctttcgtggacgaccctgacgccgggtaaaccaaatacgctgaatttttacgcccggctaatggcgacacaggtgcctgtcactgcggggcatatcaatgccacggctaccttcactcttgaatatcagtaactggagatgctcatgaaatggtgcaaacgtgggtatgtattggcggcaatattggcgctcgcaagtgcgacgatacaggcagccgatgtcaccatcacggtgaacggtaaggtcgtcgccaaaccgtgtacggtttccaccaccaatgccacggttgatctcggcgatctttattctttcagtcttatgtctgccggggcggcatcggcctggcatgatgttgcgcttgagttgactaattgtccggtgggaacgtcgagggtcactgccagcttcagcggggcagccgacagtaccggatattataaaaaccaggggaccgcgcaaaacatccagttagagctacaggatgacagtggcaacacattgaatactggcgcaaccaaaacagttcaggtggatgattcctcacaatcagcgcacttcccgttacaggtcagagcattgacagtaaatggcggagccactcagggaaccattcaggcagtgattagcatcacctatacctacagctgaacccgaagagatgattgtaatgaaacgagttattaccctgtttgctgtactgctgatgggctggtcggtaaatgcctggtcattcgcctgtaaaaccgccaatggtaccgctatccctattggcggtggcagcgccaatgtttatgtaaaccttgcgcccgtcgtgaatgtggggcaaaacctggtcgtggatctttcgacgcaaatcttttgccataacgattatccggaaaccattacagactatgtcacactgcaacgaggctcggcttatggcggcgtgttatctaatttttccgggaccgtaaaatatagtggcagtagctatccatttcctaccaccagcgaaacgccgcgcgttgtttataattcgagaacggataagccgtggccggtggcgctttatttgacgcctgtgagcagtgcgggcggggtggcgattaaagctggctcattaattgccgtgcttattttgcgacagaccaacaactataacagcgatgatttccagtttgtgtggaatatttacgccaataatgatgtggtggtgcctactggcggctgcgatgtttctgctcgtgatgtcaccgttactctgccggactaccctggttcagtgccaattcctcttaccgtttattgtgcgaaaagccaaaacctggggtattacctctccggcacaaccgcagatgcgggcaactcgattttcaccaataccgcgtcgttttcacctgcacagggcgtcggcgtacagttgacgcgcaacggtacgattattccagcgaataacacggtatcgttaggagcagtagggacttcggcggtgagtctgggattaacggcaaattatgcacgtaccggagggcaggtgactgcagggaatgtgcaatcgattattggcgtgacttttgtttatcaataaagaaatcacaggacattgctaatgctggtacgcaatattacctgaagctaaaaacctgcacgttagccctttgtaggccagataagacgcgtcagcgtcgcatctggcataaacaaagcgcactttgctggtctgttcccctcaccctaaccctctccccggaggggcgaggggactgtccgggcacatttttagactttgtcatcagtctgagcctgccattggcaggctctggtgtccttttacgctaccatgctaataatcagcacaataatcagcccaaccacggagttgaccagctccagcagaccccaggttttcaacgtgtcttttactgacaggtcaaagtaacctttgaacaaccagaaagatgcatcgttaatgtgggtgagggtgttggaacccgcagccgtcgccagtaccagcagcgccggattcacgccaaccagctgaccagttgctggatctaggattgcagcactgataatcccggcggcggtcatcgccgaaacgacaccctgacccgtcgccagacgaattagcacagtgatcagccatgccatgatgtagggcgagatattgccgtgggacatcaacatgccgatggtgtcgccaatgccggtgtcgatgatggtctgcttcagcacgccacccgcaccgatgatcagaatcaccattgcaatactcttcaccgcgctttcaaaagcgttcatcacccactgcatgtcatgaccacgtgcggtgccaaagagtacgaatgcaaccaccatcgcaataaacattgcaatcggcgaggaaccgataaagttaaccacttcccaggcaggggtatcttttaccagccagatattggcgatggtggtagagatcataatgatcgccgggatcagcggcaccagaatcgaaacgccgaaagagggcagattattcatatctaccggttgatctgctttcaggaatgatggcgttgggcgctcaagattgccgaggaacttcggcaggatcagacctgcgcagattacacttgggatcgtcaccagtacgccatagatataaaccatccccatatccgcgccataagcattcaccagcgccaccggacccggctgcggtgggaacagtgaatgtgcggtagtggcagctgctactgccgggatcgccagtttcaggaacggaattttagcttcggcggcaataacaataaccagcggcgctaacatgataaaggccacttcatagaacatcgccagaccaaaaatcaggccgatgataatcaccgacagctgtacatagcgcagaccgagacgcgccagcagcgtatgcgctatctggtgagccgcgccggagtcgaccatcaatttaccgatgaccgcaccgaacaccacgatgatagccagttcccccagcgtgttgccgaagcccgctttcatagtgtgcagcagcgacatcaaatccatgcccgccagcatcccgacggacagcgccgccaccaacaaagccaccattgaattgattttgaacttcaaattcagtaccagcatcagaccaatgccgaataccacccagagaatgttaagcacatgcataacgttttaccttacctggttgaaccgttgttattttgggcgatatgttatgtaaattggtcaaccattgttgcgatgaatgtcacatcctctgatcaataaccatcgattaccctttgctgcaatttgcagcaacaaccatgagagtgaaattcttgtgatgtggttaaccaatttcagaattcgggttgacatgtcttaccaaaaggtagaacttatacgccatctcatccgatgcaacgccacggctgcggtctggttgttcatccggatacctaaacaactccagggttccgcgtctctttgctgtggaacccactatgtgaaagaggaaaaatcatggaacagacctggcgctggtacggcccaaacgatccggtttctttagctgatgtccgtcaggcgggcgcaactggcgtggttaccgcgctgcaccatatcccgaacggcgaagtatggtccgttgaagagatcctcaaacgcaaggcgatcattgaagacgcaggcctggtgtggtctgtcgtagaaagcgtgccaattcacgaagatatcaaaacccacactggcaactatgagcagtggatcgctaactatcagcagactctgcgcaacctggcgcagtgtggcattcgcaccgtgtgctacaacttcatgccggtgctcgactggacccgtactgacctcgaatacgtgctgccagacggctccaaagctctgcgcttcgaccagatcgaattcgctgcattcgaaatgcatatcctgaaacgcccaggcgcggaagcggattacaccgaagaagaaattgctcaggcagctgaacgcttcgccactatgagcgatgaagacaaagcgcgtctgacccgtaacatcattgctggtcttccgggcgcggaagaaggctacaccctcgaccagttccgtaaacacctggagctgtacaaagatatcgacaaagcgaagctgcgcgaaaactttgccgtcttcctgaaagcgattattccagttgctgaagaagtcggcgtgcgtatggctgttcacccggacgatccgccgcgcccgatcctcggcctgccgcgcattgtttccaccattgaagatatgcagtggatggttgataccgtaaacagcatggcaaacggttttaccatgtgcaccggttcctacggcgtgcgtgctgacaacgatctggttgatatgatcaagcagttcggtccgcgtatttacttcacccatctgcgctccaccatgcgtgaagataacccgaaaaccttccacgaagcggcgcacctgaacggtgacgttgatatgtacgaagtggtgaaagcgattgttgaagaagaacaccgtcgtaaagcggaaggcaaagaagacctgatcccgatgcgtccggaccacggtcatcagatgctggacgacctgaagaagaaaaccaacccaggttactccgcaattggtcgtctgaaaggcctggccgaagttcgcggtgtcgaactggcgatccagcgcgctttctttagccgttaatatccaccggcatggctgcgcgccgtgccggttccttcttccttgccgtcactctttgaagacggattctggagtttacgatgactactattgttgacagcaatctgccggttgcccgcccgtcatgggatcattctcgtctggaatcacgcattgtgcatctcggttgcggggcgtttcaccgcgcgcaccaggcgctgtatacccatcatctgctggaaagcaccgacagcgactggggcatctgcgaagttaacctgatgccaggcaacgaccgcgtgctgatcgaaaacctgaaaaaacagcaactgctgtacaccgtagcggaaaaaggcgcagagagcaccgagctgaaaattatcggttcgatgaaagaagcgctgcatccggaaatcgatggctgcgaaggtattctcaacgcgatggcgcgtccgcaaacggcgattgtctctctaacggtcacggaaaaaggctactgcgctgatgcggcaagcggtcaactggatctcaataacccgctgatcaagcacgatctggaaaacccgactgcgccgaagtccgcgattggttacatcgtcgaagcgttgcgtctgcgtcgtgaaaaagggttgaaagcgtttacggtgatgtcctgcgataacgtgcgtgaaaacggtcatgtggcgaaggtcgcggtactggggctggctcaggcgcgtgacccgcagctggcggcatggattgaagaaaatgtcaccttcccgtgcaccatggttgaccgcatcgttccggcggcgacgccagaaaccttacaggaaattgctgaccagctgggtgtttacgacccgtgcgccattgcctgcgaaccgttccgtcagtgggtgattgaagataacttcgttaatggtcgcccggattgggataaagtgggcgcacagttcgttgcagacgttgtgccgttcgaaatgatgaagctgcgtatgctgaacggcagccactcttttctggcgtacctcggttacctcggcggctatgaaaccattgccgacaccgtgactaacccggcttatcgcaaagcggcctttgccctgatgatgcaggaacaagcgccaacgctgtcgatgccggaaggtacagacctgaacgcctatgcgacgctgctgatcgagcgtttcagcaacccgtctctgcgtcaccgtacctggcagattgcgatggacggcagccagaagttaccgcagcgtctgctggacccggtgcgtctgcacctgcaaaacggcggcagctggcgtcacctggcgctgggcgtggctggctggatgcgttacacccagggcgtggatgagcagggtaatgccattgacgtggtcgacccgatgctggcggagttccagaagatcaacgcgcagtatcagggcgcagaccgcgtgaaagcgctgctgggcctgagcggtatttttgccgatgatctgccgcagaatgccgactttgttggcgcagtgacggcggcatatcagcagctgtgcgaacgcggtgcgcgcgagtgtgtggctgcgctgtaactaactgattaccctacagacttactggtcaatcaaactgatatttggttgaccagttttcgtttttttgcccacctgtacgtgccaacttccagtgctaatggtatagtttgagattaacgggggccgtaaaattgcccgttgtaggccggataaggcgttcacgccgcatccggcaaaaatttgattaaccgcacctaacggacacaacaccatgaaatctgccacctctgcgcaaagaccttaccaggaagtcggggcgatgatccgcgatctgatcataaagacgccgtacaatcctggcgaacggctgccgccggagcgtgaaattgcagaaatgcttgatgtcacgcggacggtggtacgtgaagcgctgatcatgctggagatcaaagggctggtggaagtacgccggggtgccggtatctatgttcttgataactcaggcagccagaacacagacagtccggatgccaacgtctgcaacgatgccggtccttttgagctgttacaggcgcggcagttattggagagcaacatcgccgagtttgccgctttgcaggctacccgcgaagatatcgtcaaaatgcgtcaggcattgcaactggaagagcgtgaactggcttccagtgcgccgggcagcagcgaaagcggtgacatgcagttccatctcgctattgccgaagcaacgcataacagcatgctggtggagctgttccgtcagtcctggcagtggcgggaaaacaatccaatgtggatccagttgcacagccatctggatgacagcctgtatcgcaaagagtggttgggcgatcacaaacagatcctcgccgcgttaatcaaaaaagatgcccgagcggcgaagctggcaatgtggcagcatctggaaaacgttaagcaacgtctgctggaattctcgaacgttgacgatatttattttgatggctatctgtttgattcatggccgctggataaagtcgacgcctgacttattataataagcgcaagggtaaacgttccttgcgctttcttaaattaagaagtcgcaatgagtattactttgtaaattgcagggtattgtttagctatctgtataacctgaatgttagtactcattcttcctggtagttatttaccaatataattccattcaccattttttaattcaaacagttctggaagagatgacggttgcagagtcatacgtttgagtggtgcattttcatcacccgggataactttatatcccatttttgcatggatctccgcggtaccgggataggcttctataccaattattgggtcattacccaactcaatattagcattaagtaatgcggcaagggcgaatccggaagaatttgctacccctgttaccgtcattatctgatcaatatagatatcaatccttggctgctcattggtccatctttttgcctgagaagctggaagggttgaaatatatcctatcgtggttccggcataaccaggaacattgcaaccagggcctaatgttatttcatgaactgtatagtcctcaacaggatcgaaagggctcttcataaataaatttagccgtaaaccttctgctaactctgtggtagcatgcgcctttttacatatgccaccatatatttcgtctaaagctgaggtgattttcaagttccgatagagcatacgtcctgttgttgtaataccatcggattctctgcatgctcctgtcacataattaaatggccaaggctctttactaatatcaagttttctaatttcgacaacgctttttccatcgtaattatggttattgccacgagtaagaggcggaagatagatgttttccgaatccatgcgtgcatattttaatttacgtgtaaactcactgtcgactattgggtgatgaaggaagtgagcatctgtaataatttgactctgaagggcattgcttaatggcatagacataatagttaccttttatgagtatttcactgatgtttagaaaaatagataaatttttctgtagtaaaaagagaagtaaacaaatgacatgcatgtttctgttgtagtgatatcaactctacacggtgatattaaagggtaggaaacactctaaagtatcaaaaaacgctcatttaaaattatttgcatgcaatttaaaagcatatcttattactaattggaatttgatgttgctatattgaggtctatattaataatgcctgtgaatggtatttttgatgtatttgatatgttatcaatttatattatttacaaactaattgtttcaaataatacatggctgattatgcggaaataaataatttcccaccggaattaagtagcagcggtgacaagtattttcatctacgtaactattcggaatattcagaatatactagcggtttttttttgagtttgatgatttttatcaaatcatgacttttttcctgaaaagtcagtagatattcataggcaagtaaggttttatactttgctgacaggattcaggcctgtctcagactgacatggatgtaatgaacaaaagggaatggctatggaaaatgagcatcaatacagtggtgcccggtgttcagggcaagccgcatatgttgctaaacgtcaggagtgcgcaaaatgatgcgacaatcacttcaggctgttttacctgaaatttcaggcaataaaacgtcatcgctgcgtaaatcggtatgcagcgatctcctcactctttttaattctcctcattcggcattaccgtcattacttgtttcaggcatgcccgagtggcaagtgcataacccgagcgacaaacatctccagagctggtattgccgtcagctgcgttctgcactgttatttcatgagccacggattgcggcgttgcaggttaatttgaaagaagcgtactgccacactctggcgatcagccttgagataatgctgtaccacgacgatgaaccgctaacgtttgatctggtctgggataatggcggttggcgcagtgcgacgctggagaatgtcagctaagcacaatctccagctcgcgcagttcacgccagaagcgttcggcaacgggattcatgcgggtattcatccggtatgcataggcctgaatcgggatcaccagttcgtcccgattcagtacaacgagcttcccgctgcgaatttcttgttggatggcgtactccggcagccaggcaatcccacagccgtcgagggcaacctgctttaaaagctcgctcatcgaagagacaaaaaaggtgctgaaacttaactcactgtggcgcgtcagggtgcgattaatcaatcgccccatgtaggagttgcggctgtaattcagtaacggaaagtgtggctgcgcgaggttaaaaagtgcttctccgtgttcgtcactggcgcagacagggaacaattgagattcaaataagcgaatgtggtcaaacggcgcttccagcaaatcttcgtcgtgaaaggaaaaaatacagtcactttgcccttcacgcagtttatcgaccgcttcatcgacatcaatagcttcaattgcccaggtaaagagcggcggcatctggctgataatggacggtaacagcccgagggaaagagagtgtgcagcggctatcttgatttttcgttgcgcgtaatcgctgccgccacgcagctctgccagattgctctctaactgttgcaacagatggcggatctgcgaatggaagattttcccttgttctgagagttgcagcggcgttacctggcggttaaacaattcaacaccaatcgcctgttccagcgcacggatgcggcggctgaatgccggttgcgagacgttgcgactgactgccgcctgggaaaaattgcggcatttttccagggtcagaaaatcataaagccatttggtttcaatattatgcaaaatcgcaccacagtcatccattacgttttactctgtcagccgcccttgcgggcattctacgtccattcgggcggctgacaaccgtttaagccgtttcaaacgttcctttcacgcaggctttgccgtctttgaccatcagtttgccgcgagcgtatacctgctcaatgcgcagttctggcgtcatgaccagcaagtcagcatcattgcctggcagaatttcgcctttcccggtcaggttaaggaaaccggctacgctactggtgagcgggcgcagggcatcgctgatactgaaatcatagtctttgaccagcacctgcacggtttccagcaacgtttcaaaaccggcaacaccgatatgggttaaattcccttcgtcatcgaagaacggctggctaccgttgccgtcggagctgagggtgacgcgtgccagcggaatacccgcctgaacggcgcgggcaataccttcggcaggggcgaccggttcgtcaatgctgctggtgatatcgatggtgccgcctttgcgcgcgaactccagcgcctgctcaaacaacggtacgttgcggttaacgtgggtcggcagcagcttgctgatcggcacatcgcagttttccagcaggtcataaataggctgtaacgcctttttactgtcgcccatgtggaacacggtgacgccaggtttaccgccgagcaaaccgccaacgcgggattctgccgccatattggccaggtgataaacgtccggtgcggcagaacggtgatcagagatggcgcatttcacgccaatcacacgatcgataatcgccacgtctttttccacggaacccgtaatggtgcgggaagggacatgataagcgccggtcagcatccaggcgctgatgccttcttcattgagcgcacgggtcttggcgagcagggattccgggtggcgagagatagagtcggtgcccagcagaccaaccactgacgtgacgcccgcttccgtcaggcgacttagcgccacttccggcgtgcgcgtcgtgggacctgcttcgccgccaccgccaatcaaatggacgtgttgatcaataaaacctgggcagaggatctgcccactgagatcgacaaccgtgcagttcggtacaatgtcagaagggatattgctggcaacggcgataattttgccgttagcgacgaggacatcgcaaattccccgatcttccggcgcatacaaatgcgctccctgcagcagggtaaaaccggctgcggtataatcaatcatggtaactccttgttaaacaataagctgcataacccagatcgacagcaatgcgttaatcacgcagaccgtaatgatatgcgggtaatatttggcattcacttcggctgtccccaggcagcgaccgacattttgcaccgggttgcccattaaatacatcgcgggcagtaaaacggtgacatcgtgaccggttaatgcgccagcggttgccagactggcggcaacaccgactgcgccacccatactcattaatgcggctaaaaggacggttgccgcttcaccgggtaatccccacagcgccattacgggttcacagatatgccccacccagtcgagcaggccggtaattttcagcgcctgaatgatgacaaacgccatcaccacgtttggcagcaggttggtcgtggcgatagtaaagccacggcgcgcgccatcgataaacatatccatgacgtttttgcggacctgagttgtcatgcttgcgctccttgcgttgggttgcgacgttcttcgaagttaagccagacgcgcaaaatgttggctccgacaaatttaaacaccaggatgacggctaaaggtacgattacggacgtgcccagaaaggcaaacaccgcgacgccggaagagaagtagttggtgatgatggcgctaccgctggtttgatatgcggcgaaaatcactttatcgcgttcggtaatttcaccttcctgcgccagctctttggtcataccggcggcggcatcggtgttttgcaggttagcgatcagcgccagcgagcagatccctggaatgcccaacaacggttttagcacaggtgtcattaactgctgcgcggcgcgtaatccaccaagaccatcggtaattgaaataatccccagagagagaatgactgacggtgccagctccagcgcaaagagaaagccatctttagcccccgcgccacccgcgccgcgaaatgaggtggtggctccgttcgcaccaggcagttgcccaaacgatccgttcagaacggaaaaatcaaaaacgcgccaccagctgtctgttccggaaaaaacaccggaaaaaaagattatggtgagaaaaaaggccagataccctttaatgcccactttttctgtcgccagctccccggctacagcatccccttgttgtgtcataacaatccccattgtttttttgtgtttgtgtgttgcttgagccaggaaaattcctggaactgaaaaaccttatcagccatgtgggtatggggaaaatgcaagtatgtttctggctatgcgttttttgcatagcggaaaaattacgctgtgtggaaaaggctctgcgcaggattgagttgcagaaaattcataaaccaagtgacaatgacatcagtaaataaaaacagaaaatccagggacgaaaacgagatggcaaagtacaacgaaaaagagctggcggatacgagcaagtttttaagttttgtcctccgacacaaaccggaggcgattggtatcgtactggaccgtgaaggatgggcggatatcgataagctcatactttgtgcccaaaaagcgggcaagcggttaacccgtgcattgctggatactgtggttgccaccagcgataaaaagcgttttagttattccagtgatggtaggtgcatccgcgcggttcaggggcattcgacttcgcaggtcgctatttcctttgccgaaaaaacaccgccacagtttctctaccacggtacggcaagccgtttccttgacgagataaaaaaacaggggctgattgcaggtgagcgtcactacgtacatctctctgctgatgaagcaacggcacgcaaagtgggagcaagacacggatcgccggttattttaaccgtcaaagcacaggaaatggcgaaacgaggcctccctttctggcaagcggaaaacggggtctggctgacatcaacggttgcggttgagtttcttgagtggtaagggaaacttccctcatgaagtgaccacttgtagcttaaataattgcactgtgctgataagcgcagcaataaacaacgccgccgcgccgcagagagtggcgctggcaagcgccgatgttccattgctgagcatactggtcagcgccgggccgaggatttgcccaatgccgtaaatgagcgtcacaaagcctaaaagattgagatttcccggtacgctcagttggcgggcgatagtcatcaccagagatgtcgtgcccataaaggtaccgccaaaaccaagactgctgatgataagcaagagaggcgagtcgctggcgagagtaagcagcacacagatagcctgcaccagcaaattcgccgtcaggcagggcaaagccccccaacgttttgctgcccatagccagccaaagcaaccaggcacaattgataagccgactaacgtccagagatgggcggttaacaatggtgagcctgcatctttcgccatgagcggcaggtaagtcgcgacgatgatataaccaaatcccgccaggccgtacagaatagccagtaaccaccagctcattatctgttgctccgtttttgccaatggcattggtgtgatggcgtgttttttcgagggcattaaaagcgtaagtgcaatcagcatcatgccagaaagcgccccggcgccttgccataacgtttgcgaggagaggtcaaaatgcaggcctgccagaacatattcattgcccagtgcgatgccaatgccaacgccagaaaacaaagctgccagcacaaaaggatggcgcgtgtgctgcataatcagcgtcgaaccaaaaatcagcataccggcgctggcgacacccgccaggacgcgaatcaataacaccagaataaatggcggcaaccatgccattgcgaggatcaacaacccgctcgccagggcagaagccaacagaaatgggcgcaggcgcgatggctggtgaaatgcgccaaaagaaaatagcagactgccagccagataccccgcatagttgccgctggcaatccacgagagctggctaaatgaaaacgatccttccgccatcatgacgggcaacataggcgtataaaggaagcggcctaaacccatacctaaggtcagaaccagcatcccgaaaagcgcggtgctgaaagaaaagcgttctacgggatgcgtggacgaaggcatgtttaaccttgtttgtcatttttgttgttaacaagttaataacaaaaaggtgaagcatgccagcctgttaatgcgatgattgaggggtaaagcgataaaaacgatttggttcgctaacgatataaatattaccagaggcatccatcgcaaccccttcggcctgtttgatgttatgcgacaaacctcgactgcctttggttagtgacatttcaccgataacctcgccaaccagggttacttcctggagtgcgcgagattcatgagacagcaccagaagcgtatttttttgctggttaaattctgcgccggacacatcatctaaagtaaattgccgttgtagtgcctcgtctttgctgatgtgtaattcattgctacttaacagcccgttaactttgtagacctcaatcggatttttctctttaaaaaaccagaaagtgtgatcctggcgagaataagccaacccttcaaaaccgcaattggttggggagtcttgcagcgggatttttatttttttgaggatttttacttccgagtttggggtcagtgaaatcacataaatggcgtaatcgcgctcatcgctaatgacaaactgattatcgccaatgtattcgatcgtctcgagatccttaacaaaatccagaggaattgtgcggataaaatcaccattggtggtcatttcaacaatggcggcaggtttgttgatagtgctaaaaagagtattgctttgtgccgaccaggtcagcgaagagatattattcgttatgcctgcaatttctttgccgtcaatggtggcgtggtaattctgaaatgatgctgcatgattgcttttacgggcgcaagattgcacgaagaaagtacacactgccacaatggcaaaaagaatcacaataatggagatgcgtttacttaacgaaatactttttgtcacggtaatccctttaaggcaaatcaataagatatcgagaagtatacgtagcgaccttaatgaatccttaacgcggagaaaccccgtaatgtgcaatgcagcgccagacaccatcctgctggcaataaattgactcagtcagcccagggatcacccattgtatttcctcgccggggggacaggtcagccaaatgcataacccgcagccgccgcgtaaatcacggggaatatcgctgacgcgaaaagtcatgcccgctgcctgcaacgctttgcgggtttgtatgacgccgaccgtggagtgaaataaaaataaaaactctttcatcggcgtgtcctcactcgttgaccaattaccgccgcgccaattgcgccagcaaattgcgcatcaggatgggtatttaccggcattcgcaggtgagattccagcatccgggcaaacttctggcaatgactaacgccaccagtaaacagaatcggcgcttcacaggagagacgagcaatgaaattggcactcctccgcgccatcgcgttaatcactcctgcgagaatcgcttctggcgcgacgcccgctgagcgcaggctgatcgcttctgattcagcaaacactgtgcacatactcgtgatggcgtgcggcgtgacattttcggtaatgctgtcgagttgctcgacgctggtgccaagcgtgcgcgagatcacctccaggaaacgcccggtgcccgccgcgcatttgtcattcatcaggaaatcgcacaggttaccgtcatcatcaagctgaatcactttgctgtcctgaccaccgatgtcgattaccgcgcgcgttgctggcgcaagaaaccgtgcgcccagcccgtgacaggagatttccgttacctgtttatcggcaaaatccaccagttgccgcccgtagccggtgagcgtcagaaacggcgttgtctctaacccttcgcgcagagtttcccaggcttcagtaattgctgttgccgggcgaaagggggttggaacgaggaaacggcgcgtaatcacgccgtctgccagtaagatccctttggtggcggttgagccggaatcaatgccaatcgaatatgccactgccactccttacagcatctcaataaaggccgcgacacgggtactgagctgcccgacatccgaggtggagtagtctgtttcaatagcgatataaggaatgttgtgctgctggcgcacatgacgtttaatcgccagcgattccaccgcgtaggtatggcacgcctgcaaaatcacatcaactacgccatcgacctgatattcctccaccatctggctgagcattttcaggcgctgatcgttcggcgaaacacaggagcagccaatcgccagatatttatccgccagcgcgtcgtagacatcgcccgtttctgccacgcattgctcggtcgctttcgccccggtgcagttttcataaccgacaacccagccgccattctcttcaatcgcgcgcaccactttttctgctgcgccgccaatcgggcagccggtgattaaaatgcgcggacgcgggtccagtcgctggccttcttcccactgctgacgaacgcgggcggtcattgcatccagttcattgatcaacgcctctttatcgaaccggaaggttgcgccgtaaaccactttcagaatgtcgctgccgctaagcgccggaggatttaactgcccaagatgataaaaattagccagtgcgcgacgttcgcggtttttcagcgcaatggcatcgcgcagagcatcttcgctaatctcgtgcccaaaacgttcttctaccgttttttgcaagcgcagcatctcggctttccataacgcacgcgaggcatcgtccttaacgctgttgggcaattgcatcacatgaacaggcttaaactccgccatgtattcatacattttctttttgccgtcgcaggtggtttcaccgaccaccagatccgaaaagtagaagtaggggcatttatcggttttgccgaagccgtagctgcttttaatcagcgggcagaggttgcgcggcagatctttctccgcttcttcaatggtttcatcagaggtggaacagagcgaaaccacaaccgcaccggctgccatcgggatctcttgcggcataaaggtgcagtaagtgccaaccagcggaatgccgcgctccttgagatccatgacggtgagaaagcctgtctggcgagcttcagagaactgatcgaaaatggcgggtagatcggtgacaagtgacatgattttccttccccgtaccacgggagataatgaaaagaggccacattattaccattcttttagtatggtttatttgatctctctcgcggttagccacttagtttttcatggatttctaaaaattgccgagggggaacaaggccgggagctgcgacagcaaatataaaattagcccaatacaaccgccaaccagcgtaccgttgacacgaataaactgcagatctttgccgatatttaactctatttgccgcgacatatcccgcgcatcccagctttttaccgtatcgctgatgtggcgcgtcaggaatgcggaaaactcaggcgcgacgcggtgcgcggcttgttcaagatgaccatttaacgacgcccgcaaggcatcatcggcaattaacgtttcgccaaaccattgacccgctcgtgcgatgcgttctttcacacgagaatcttcactgttgatatccactttcagccattcccgtaaatccccccacaattcactgagatagcgattaaaagcttcatcttctttcagatagctttttacggcatcggctcgcgctgccatttccggatcgtttttcagcttgtcgatcagggcgaaggtggcgcgatcaaacgcatggcggatctgatgcgcacgatcgcgactaatatcatcaagcaaagaattcaccgcgtcagaaaccaactccgcgctatgttcgcccaaccattcggtggggagaattttggctttcagtggatgctcgctctccagccagcgaacaatttgctgggcgataaacttgcgcgatttatcgcgctggagaagggcgatcaactgtgcgatcagcgtatccagcagcacctgatgacgatcgtttttggtcatactctccagcatcaacgcactggtgccggaaagatcgaccttatcaatcgcccgatggaccgcgcgcttaagcaggcgctgaatacgcgcatcatcggtaagttcgagaaaaccgctcatgatctgcaacagatgctgaccaacgcggcgggcgttttctggctggctaaaccagttgccaatcagcaacgccggttcgtggcgtcgaatcaatgccaccagggattgagtatcaagaaatttttcctgcacgaactggccgagattttcgccaatccggtctttattacgcgggataatcgccgtatggcgagaaatgatcggaatcggcacgcggcgaaacagcgccaccaccgcaaaccagtccgccagcgcgccgaccatcgccgcttcagcaatcgccttcacgccgctcacccaaaaattgggcggcaaaaacagcgtaacgacaaaggtagcagcggcgataagcagtaaagagagcgccaaccttttggcgcgtctgagttcgatgagtttattcataacgttaagaatagagcctgacggccggatcgcgcaaaaatcactgctcctccactagctcggctgcctgatgctggcgcacgcgattgagcaatcccgccagggtgaaaacgacgataacgcccgccacaacggctaacagatgaaacggcaagcgaccgccgttaaaccatagccagcggccgatttcgaccgagaccgacatcaccatcaggatcaccatatttagcgatgcggagacggtccctttcggtaacttattggaaaacagcgtaaagcggaataaggtcgggaaaatcaaaccaatcccgaaagcatacagactggtgcccagcaccgaccacagccagacgtgcggcgacagcagattgccgacaatcaacagcgagaggccgaccagttgaatgggtacggcacgccagataaaccgcggttcggtcggatctttaacaaaacgcgccacgatggcattcgcaacaatcaccgcgccgaacaccggaacctgtgtccaggcgaactgcgaagttgttaagctgcctgcatcgataaggatcaccggcgagacagccacccagctcatcatcgggatatagcttaaagagatggttgctgcgccaaagaggaacagccgattgcaaaagacattacgaaaatcgcgcaagacgcttttggcgctaaacggaaccgcgccgcgcttcaccgtctctggcatcgccaacagtaagccaacaaatgagataaaacccataaccgcaatgatggcaaaaaggactttccagtgcataaagtgcatcagagctgcgccggaaagcgggccgataatcggcgcaatcagtacgatggaggtgataatcgccatcaacttgatcccttttgtctgtccgaacgcctcctgcaccgtgacataaccaacggtggcaataaaacagatactggtgccctgaattgcacgcgcgataagaaactgtgtcatagacgttgtgaacattgtcgcggcgcaggcaagggtaaaaattagcgccccggtaatcagcaccggcctgcggccaattctgtcggaaagcggccccagcagccactgtaacgccataccgccagcaagatagagactgacggcagcaggggccagactgacatcggcattaaaatcacgtaccacattaatgatcccaggctggatcagatccgtcgacagatacgcagcaaagtcatattattattaattcatcgggaaaaacagcgtggcatggcgggtaaaaaaacgtggcataacaaacaactccttgtccggagaaccccaacggggaaaacgaaattcaataccgtcggtaatgacgaaaggcaggtgagaagggcaacgagactgcaaatgtactgaatttcatgtaatcaaccacactgcctgtgaacacacagacagagaaatactttctgacttcgggtcagaatgtataacgattacaaatagtcatcagcacattacacctcttgaattgatgggttgcatagaaaatatacaccttaagtgtaattaaaatttgcggttaatcaaaagagcgcggtggaaaggggaatatctgccgggtacaggacatgtaaaacgcgagcttgtttccggaaaaatgtatcgtttgcagaagaataaaaatagcctggaaagcgcctcggggaatgggaaattgccgggtgagaatggttttgttagtcgctaaagtcaggccatctttttcaacaggtgatggatcgccatgacaaacttcacgaccagcacgccgcatgatgcattatttaaaacctttctcacgcaccctgacactgcgcgggattttatggagattcacttacctaaagatttacgtgaactgtgcgatctcgatagcttaaaactggaatccgccagctttgtcgatgaaaaattgcgggcgctacactccgatattttatggtcggtaaagacccgcgaaggcgatggctatatctatgtggtgattgaacatcagagccgcgaggacattcatatggcctttcgcctgatgcgctattccatggcggtgatgtagcgccatatagagcatgataaacgccagccgctaccgttggtcatcccgatgctattttatcacggtagccgtagtccttacccctggtccctgtgctggctggacgaatttgccgacccgactaccgcacggaagctttataacgccgcgttcccgctggtggatgttactgtcgtgccagacgacgagattgtgcagcatcgcagagtcgccctgttggagttgatccaaaagcatattcgccagcgcgatctgatggggcttatcgatcaactggtagtattactggttacagagtgtgctaatgacagccagataactgcgctgttaaattacattttactgactggcgatgaagcgcgttttaatgagtttatcagtgaacttacccgtcgaatgccacaacacagggagcgaataatgacgattgcagagcgaattcataatgatggatatataaaaggggagcagcgcattcttcgattgttgttgcagaatggggcggatcctgaatggatacaaaagattaccggactttcggcagagcaaatgcaggcattaaggcagcccttgcctgagcgtgagcgctattcatggctcaagagctaatcagagacggatgacaaacgcaaagcagcctgatgcgctatgcttatcaggtctacataacccattaaatatattgaactttaaagatttttgtagacctggtcaggcgttcacatggcatccggcatgaacaaagcgtactttgcttaattcaggctggaacgtggcgatgacccagcaaagataaaacgagtcacaggttatgcatgagaggaaatcaggcgcttcgccgctatttcgaatttattccattgcccgatacacggcctcgccaatttgcttcagtgcttcgcgataggtttcgctgagcggcaaagcgcagttgatgcgcagacaattacggtatttgccggaagctgagaaaatcgagcctgccgccacctggattttcatgcggcacagctgccgcgcgacgcagaccatatcgacctgttcaggcaattctatccacagtaaaaatccgcctttcgggcgcgtaatacagatttcgcagggaaaatattcccgtatccagcaggtataaagcgccaaattgcgctgatagatctgccgcatccgccggatatggcgatgatagtgaccttccagcacaaacgttgccgccgccatttgcgtggacggcacattaaagctgctgatggcgtatttcatatgcatcagtttatcgtgataacgccccggtgcgacccaacccacgcgcaggcctggtgcaatacttttactgaacgagctgcacaacagcactcgcccgtcgatatcccaggaatgaatggtccgcgggcgcggatactccgtcgccagttcgccatagacatcatcttcaaaaatcacaatatcatgacgctgagcgagagagagaacggcccgtttgcgcgcgtccggcataataaatcccagcggattattacagtttggcaccagaatgatgcctttaatcggccactgttccagcgccagttccagcgcttcaacgctgatgccagtttctggatcggttgggatttcaatcactttcacgcccatgccgcgcagcatctgcatcgaaccgtaataacagggggattcgaccgcgacaatatcgcccggtttacacactgccattaacgccagcgacatcgagttatggcagccgctggtgatgatgatgtcatcggcggtgaccaccgagccgctgtcgagcatcaggcgggcaatctgctctcgcaatactcgctgaccggctaacaagtcataaccgagaacggtttgcagattatgctgcaccacccggcttagctcccgccacagcggtttcaggctgggcgcttcgacatccggtgtgcttttgcttaacggaacaatggaactgtcgctatgcgcctccagcatatccagcacctgatcccactgggtaatttccaccgggcgctgcaccggacgcgtcatcggcggtactggcggctgggctttacgttgtgcgacaaaataacccgaacgcggctgcggagtgatgagcttcatcgtctccagcgtctgatacgcctgctgcacggtgctgatactgacgccgtgctcctgacttaagctgcgcaccgacggcaatttctccccgtgacgatacagcccttgctcaatccgttcggcaagcagagtcgccagatgttgataacgcgtcatgctgtattccttatgtggaccatacagagagaaaaaccggtacagatgaggctaaaaaaccggatgcagatgctgttttaacctgtctgtatgttaaataaaagtaatatttgaatctgtattgtgaactgccagaaggtggatgatgaagcctctgaaagatgaggaggtagcagatggaatttcacgaaaacagagctaaagcgccgtttatcggcctggtgcaactctggcaggcggtgaggcgttggcggcggcaaatgcagacccgacgcgtgttacagcagatgagtgatgagcggttgaaggatatcgggttacgcagggaggatgtggagtgaggggggatatagatttatatataataaaacgtttttatgtttttaaattaagttataaaaattttcccgagacaattcatcaataggtatggagtgtacaggaatatcttcttcactaacctctttaaactcatgtcgataacggtcaaaaaacgcacagtgattacttgtgttttttgactgactttacaactctcattattcgctattgtgcagtttctctaattgttttataccctggaaagttaaatgtcagctactgaatactttttgattgtttgagatttattttcatttgaaattataaaatcaggtgataaatgagttgtgattaatagatggttgatatcatttttatctaaaattgatttatagtatcgacctgaaaaaatagttgttgccgcctgagtaactatacaatattctgaaaggttttctttcaaattagaaatgttgtggggttttgtttttgtatcttttatctctaaggagcttgctttgggtcaatcagaatacatttcatgggtaaaatgtacttcctggctaagtaactttgtgaatcttagagggttgagacaaccggatggccgtcctctttatgaatatcatgcaaccaatgatgaatatacccaattaacgcagctactccgtgcagtcggtcaatcacaatctaatatatgtaatagggactttgctgcctgttttgttcttttttgctctgagtggtaccgcagggattatgaacggcaatgcggatggacgtgggaccctatatataaaaaaatagggatttcattcaccgccacagagcttggtactatcgtaccgaaagggatggaagattactggctgcgcccaattcgattttatgaatctgaacgacgcaattttctcggaacattattcagtgaaggtggtttacctttccggctactcaaagaatcagacagtcgctttctggctgttttctccaggatccttggacaatatgagcaagcaaagcagtcaggtttttctgccctttcgctggcaagagctgtcatagaaaaatcagcgctgccaactgtttttagcgaagatacctctgtagaacttatcagtcatatggctgataacctcaattccttagtacttactcacaacctaataaatcacaaagaaccagtacaacagcttgagaaggttcaccctacctggcgaagcgagtttccaataccgttagatgatgaaacaggaacgcattttttgaatggactgctatgcgcagcctctgtagaggctaagcctcgactacaaaaaaataagagtacgcgttgccaattctattggtcagaaaagcatccagatgagcttagggtgatagtatctcttccggacgaagtttcctttcctgtaacaagcgagccgtcaactacgcgctttgaacttgccatttgtgaagatggtgaggaagtctctggccttgggccagcctatgcttctctggaaaacagacaggcaacagttcgattacgtaaaagcgaagtgagatttggcaggcaaaatccatcggcaggtttgtcgttagtggctcgtgctggagggatgattgttgggagcattaaacttgatgacagtgaaattgccattggtgaggtgccgttaaccttcatcgttgatgcagatcaatggctgttacagggacaggcttcttgcagtgtgcgaagcagcgatgttctgattgtgctccctcgggataatagcaatgttgctggttttgatggccaatcgagggcagtaaacgtattaggactaaaagcactacctgtgaagggatgtcaggacgttacagttacagcaaatgaaacttatcggattcgcaccggaagagaacaaatcagcatcggaaggtttgctctaaatggaaagcgtgcaagctgggtttgtcatccagatgaaacatttattggtgtaccaaaagtcatttctacactaccggatattcaaagcattgatgtaacgcgttacacgtgctgacaaaacagcattacagccagcaggaagtactgcgttggatcgatgtctgttcagggactcaacctaatgcaaaggatcccgcatttcttaaagtcagggcgcatatcttccagcgtaatacctagggaatatgggcttgtgttgataaagattgcagattaaagcacggtacaccgctcgacaaaggctggccctttggctatgtgtatgtgaaccagcgacaaaattgtgactgtggaagccctgtatacgaagttgcattctgtaatgattgtaatgagcctcatcttctggcacgggacaaaaagggcaaactagtccagtgggaaaataaaggtggcgatgaattctctttgcaggatgaagtacctgttgaacatgacgctacagaagaaaaagtcgaaaaagagaacagttttcagcctccgttgattattgccgcaggagagaccagcgaggcaggttataccctacaacgcctcgaccgtcagacgcgccgtattggcgttattaacaatgacagcattccgctgattattaatgatattgaacaggtttgtagtgccagtggctgtggctacagaggcatgagtgggaaacagcccttccggcgtgcactattaggtgggccattttacgttactaatatcgtgcccaccgttctagagtattgtcaggactttaccagtgatgaaggcaaagagggcgtcggaccagattcgttgccaggacgaggtcgtcgactcatcacctttacagacagtcgacaagggacagcccgaatggcggtgcgtatgcagcaagaagcagaacgcagtcgcttacgcggaagcgtagtcgaaattctcagctggcatcaaaggacgcaaacgtctacagcgccgaatgccaatgccgatctggaaaaattagcggccagggcgaagcaagcccgtgagcaggcagaagaatatcgaagctggggaatgccagaccaggcgaaattgtcacaagcacaggctgaacagcttgaacaggcttatcaggctgcaaccggtgggaaagccgcgactatcctggtatcccgaacctggacggagatggttaacgagcttaaagagagagccgatatccgcgggccggttctgcaatataaccattatcttaagcctgaagtgtttaatgaaaacggcggcccccttaagctttctgaaatgttgttgttccgggaattcatgcgtcgccctaaacggactaacagcctggaaacacaggggctggttcaggttggttaccaggggctggagaaaatacataagagccccttgcactggcaggaaaaaggattaacgctggatgactggcgcgattttctcaaggttacgttggatcattacgttcgcgagagcaacttcacacagctggatgatgagctgaaaaactggattggtagccgtttttcatcaaaattcgtccgtaacccggaatcaaaagatcctgaagataatcagaacagacgctggcctcaaattcgtaatggcaacgtatcccatcgtttagcgaagttgctgatgctgggggctggattcaaaaccgtcaatgcggcaactattgatattatcaatacatggctgaaagaagcatgggcccaacttaccggaccgcttgcagtactgaaacccgatggcaaccgtttttatttaccgaaagagcatatgactttttctttaatcacggatgcctggatttgcccggtaaccaataaaatcctggatacggcttttaaaggcttaaccccttatctgcctacccatatttcgttcgagcatcttaccctggcgcaatatgacacttttgtcgcgcagaaagtcacaatgccggaaatctggaagctggatcgttcacaggaagactacgcagagggtctggcaaaagcacgcgactgggtcagccatgatccgctgatcgcacaattgcggtcggaaaacgtctggacagacattaacgatcgtgtcgtggaaggcggcttctactatcgtactgccgagcactctgcccagcagtcgtcagaacgtctgcaaagctatgaaaagatgttcaagaatgggcaactaaatgttctcaactgttccaccaccatggaaatgggggttgataccgatcgcgtgatgacgctggcctctcgcagccagcaggcaacgattccggggccggagtggcacctgaatgacgaactggtggtgcgtagtctcggttataaaacggtagaactgaacgagtttattctgccggctaaagccaccaacgctgtcgagcgggtcaaagacattcagatccacaaacagttgaatggaccactgtcgcagtttgggcaacgcttctgggacgtgctgtttaacgaccatgaagaagcgcagtcactgatgaataacacgcgaattaccggcgttcactataccgatcgctatctgcaaaacccggttgcgctggcgttgttgggatcaattctgagaccgctaaaaacaaagctgaccgatggcgctgaagtgacgctggatacgctatttaaagataaagatcgccccggtaaccggcctttccatgactggatgagcatagcggattttcaggatttcgctgatcagtggtttgctgctgcgctgggcaggccggtagaactgacggtgttcgactcgccgcgcgatatccctcaccatcgtaaactgacggtgacttttgaggatggtcaggtattgaagatccgcttcgatcaggggatgggctactggcgcatcaacttttcatcgcaatggcattactttgatttccgcgatgacgtttctttccagttagtcaaaatggctcaggcctgcaaggaagggaatgtcgccaacagcgaagagagttgggcaacggatgtgctggtggaggtgatcgcctcctgatgatgagccgctcccgatgtggtgtcgggagcggtattttctataaaacttaccgcttatttgagatattcatcgaaaatgtcgagtaattcttgatgtatacacggccattcctgacctaaattgacggtacacaagccaatatcgaagccattaattttataacgatgtttcactgcggtatctacgtggggatatattaataacccccctatgttttcgccattttcaggctttaacgaccataagtaattcatcagttgataaagattttgcgaatgaaatttttctgttcccattcgtcgtgaaaaaatgctcttatagtatttggcgtcaacgataagtattttttctgatgagcgaatggtgatgtcagtttccattcgaggtaacaaattaagtgactgatccgatatactcgatgcatcccattttaaataagagcgggttgtgtttgcagacgttaattcacgacggcaaaattcataaagaaacttttgataaagtaatgacatctctttttcgtttctttcaaaatcatagaaacggtagtgtcctttgttttgacctggaatagaattattgacgatgaatttgcagacactgataacgaatttataataacgcgtattttttccgccattcagatagctgaaatgctgcggagttaaatgaagagtgctaatgcccggtaattttctataaagtgaacgagcttcatctctgatagttgaatttaacttttcatgcttaattaatatggctaatgtgctttttataattcggttagccagcgtgtcttcattaagcatatcaaaagtactgacggttttcccatgattaagatggaagccgcgtattgttttagcaaactctattcgccctttgatgccaggaatgatctcggtgttaggattgtaatcaagctcaagccctcggcgtgaaagctgtaaaacccctttatttaatacataccccaggatatcaagaagattgttaccgggtatggcttcaaggtttgcctgcttaatttcctgtaaataaccccatgcataggtaagcatgtaatagatattacggacaggtatcacgggctgttccactatgagtcccctaataatttgttggtccatttctgttgtttataggggtcatcaaagaaatattcttcgagtaaaggggcgatatccgtcatcacaatttcattaagccattgcgtatccggagaggtgccatcttccaacccacagcagaagtaactatgcccaatgcggaatcctttcccaaggatagtggcctctttgctgatttcctggttcaactcgttcattttttggcataaagactcaacaaatgaaggttctgcttttttattcagtaaaaaattccggaactgtggtgtatcaaaacctggctcaatatctatgaaagaaaatcgtctgcgtagggcatagtcaacaacggccagagagcgatcggcagtattcattaaaccgatgatataaacattctccgggacatagaatcgttcttcatcgttttcggagtaggttaggggaacagaccagttttcacctcgtttatcatgttccattaacatcatcacttcgccaaatactttactgagattggcacgattgatttcatctataataaaaatatactttttctctggctgctctttagcttgctgacaaaaattgtaaaatatgccgtctttacgtcggaagccgacgccattcggacgatagccctgtataaaatcctcatagctataagattgatggaactgaaccatattgacgcgttgcggagccttttctcctgtcagcaagtaagccagacggcgtgcaacaaaggtttttccaacgccgggcggcccctggaggataatattttttttgatggttaatcgtttgagtatcgtctctattgtggtttcagggataaacaaatcatttaacgcatcttccagacagtatgattcagtttttgacataggtggaataacactcttgccagaattaaatattaatttatagtcgttgattatgttgtccagcatagaggcaaatcgggtgtaatcaataccctgtgagactttttgggaacaggcgtaataggactgtccgtattttttaggatatacacccgaagttgcctgaaaatactctgcgattgttttaggtatgtctgaagagaactgccattgggcatgtggttcattcgtgtcgcttataccataagccaaaaccaactcatcaaaatctttataatagagaataacgggatatataccgttagaagcttcctgaccttctccaagaaatgcaaaccagggaatagacgtaaaattaccataaccgaaactcaattttactcgcaggttacggtaagacgttggataatctttagtggattgcgaacgttgttgctgtgcttgcttaataaatttttcaatccagggttgaatagattccataagatatgccttcctcattgctaagcctctattatcgctttcgcaacgtactgaaacaatagatttttactgcaaaatcagactggtaaatatttactgagggggaaagtttctattgagtcagtggaaggctcccggtggttaaccgggagtaaacgctgttacgcgactttctgtttaccggcaatcactccaataaacgcctgcacctgcttttgtttacgcgccgacagtttgcacacctggcgtagcgactgcatcagttcgctctcctcggcggcgggtggttgggcggtgaggacaatacagccttccatcactttgacatctaccgccgtgccagtggcaaaaccggcggcttccagccactgacctttcagggtgatggcgggaatacggctgtaatccgggtagcgactcgcataaccgacggtgacatgacggttatttgccggggagacttctgcttcgaacggttgtgcaatagaatgcgtgtcagtcataactgctattctccaggaatagtgattgtgattagcgatgcgggtgtgttggcgcacatccgcaccgcgctaaatacctgtatatatcatcagtaaatatggggaaagtccagctaaaaatagaataaaatgggcaatttctggaatgatttaaatatatttatgtgggttatgattggcgtgaaataataaaaagcgcaccggaaaggtgcgccagaaaataatgttcaggattttttacgtgaggcttttttacccccgctagctgcgcgttcagctttgattttttccagcaacgcggcggcgctgttttctccgctgatcaaatccgggttttcggcccgccactgggcggtaagttcaccacggaacgcttttgccaggatggattgcgtcaggttgttgacgcgggctaaggcgttgttgacctgtttttctatggtgtcggcgtaggcgaagagttgctcgacgcggcgaacgatttcggcttgttcttttactggaggtaataaaacaacttgggatttgatatcttttcctgaaatacctttttgaccagaagttgttttcacgcagttcatcattgcatttcgtgctgagggggatgaaaaaaatatttcgatatattctggtaaagcatctttggttaatcgagctcgaataagtttatcaggatatagcaaattttgatgttgtaattttttcaataacccacaaacaccaacaaattctaaacttccgttatagcgagtaaataaaagatctccatcttgtaatttgtggcggtttagttcactttctgaacattctagaaaccgaatatcgttttgatctacatggccagcacgtacagaactaatgcgtagtattggatgaccaacaccactttcatttggctttgatgaaagaccattacgtaattcagttaagatagattcaaaatttaacttcttaaatacagaatgttgcggctcaaaattacgccatttttctgtcaattttccattaactgcgccccccaataccgcttgacgaaaacgtttcaggatttgtgggatttgctcaaaacgtgctttggtgctgtctacctgcgccagcagcgtatcgagtttttcagcgatgattttttgttcggcaagtggtgggattggtatatttatcaaatcaaagcttgccggcttaatattattaatatttgcaccagcagaaagtgatgaaattttgtttcgataaagagaagattttgtgaaatgagcaataaaaccagaaaatataagtttttcaggacgtaatacaccgcaaaatgcgccgaaactacattcaaatggtagatgctgatgtgcggatttaccaactacggatttgctccctgatgacattgcaataacaatatcttcaggagatattttttgactttctttaacaagatttttaggaacaaaaaccaagtccgtagtatcaaacttgccattctgaatattgttcgcacggataagaggcaaataatcatcttttagataatttattgcctgctcttttttatacgttactcctcggattagagttgtgaccgtagatactggggcgataacccacccctccggcaatttccccgcactcattccttcaccccaccaaacgcttcttccagcaactgacgctgcaaatcggcctcatcgctcgcccccagttcacgcatcagcgcatccagttcagacagcgcctgtaccagttcgcccatcgcttctgccgctaatacatccggctccggcaggctgtcggcatcaatactgtctttatctttcagccaggagatatccagcgaatcggattttgcggtgcggatccactcacggctgaacttgcgccagcggctggtagcaagatgctggtcggtgtttttgttctcttcgctgtcggcaacttccgtctcttcggcgttaaaactccattcaccttcagtgcgcgggcttaaaccgtgcgggtcttcgccatacacgcgctcaaacggctgcaaatgctcgtcggtaaacggtgtgcgcttgccgaaactcggcatattggtacgcaggtcatacacccacacatcatcggtacagttcttatcctgattcgggttcgccaccgtccctttggtaaagaacagcacgttggtcttcacgccctgagcgtaaaaaataccggtcggcagacgcagaatggtgtgcagatgacacttatccatcaggtcacgacgaatgtcggtgcctttgccgccttcaaacagcacgttatccggcaccaccaccgccgcacgaccgccgggatgcagcgtttcgataatatgctgcataaagcacaactgtttgttgctggtcgggtgaacaaaggtgcgggtaatgttggtgcctgcggcgctgccaaacggcgggttagtggcgacaatatgcgccttcggcaggttttcaccgtcgctacccagagtgttgcccagacggattgcgccgccgtggtcgaggttgccttcaatatcgtgcagcaggcagttcatcagtgccagacgacgggtgccgggcaccagttcgaggccgataaacgcgcggtggatctggaaatcctgcgtgtcgccatcaaggtcgtccagatcattggtttgcgacttaacatagcggtcggcttcaatcaaaaagcccgccgtacctgccgccgggtcctgcaccacttcacgcggctgcggtttcagcagatgaataatggttttaatcagcggacgcggggtgaagtactggcctgcaccagacttggtttcattcgcgttcttctgcaacagcccttcgtacatatcgccgaagtcatcgcgcgacttaccgtgcgcgccgttgtaccagtccagcgaatccatattgctgaccagtgcggttatttgtttcggctcggtgatggtggtactaacattatgaaaaactgcctgtaccagctttttgtcatcttcgcctaaatgcacgagcatttttcggtagaactgcaactgctcctggccgatgcgggatttcaggtcatcccagcggtaaccttccggcaggtattccgcttcctgaccggtctctttacacattttcaaaaacagcagcgaggcgagttcattgacgtagttttgataggaaacgccgccatcgcgcaggttgtcgcacagcttccacagcttcgcgaccagatcgttattgttcattgtgagttccgtaaattaagcagcggcccaaattcatcgagccgcagaagaagaaattgccgagggtaatatacacaaaatcattcaggttgcatcaaggcggcaagtgagtgaatccccgggagcgtacagaagtacgtgaccggggtgaacgagcgcagccaacgcagaggcagcctgaaggatgaagtgtatacgtgtcaggccagctcgtcccagatataatcgctgaatttgcccagcagggtatcgagattatcgtcaaaggttctttgcagcatcgccttcccgccgcgacggtggaagttgccggttttgaagacatcgtcgtcgagcaccactttctctttcagcgcctgcgctaaacgatcgagccagcttaattgctcgctgctccagtcgttttcgcccttaatgcgcgtcagcgcgtgatcgacacgttcctcaaacggtttcagcgcatcgcccaccgcagcgcggcgaatatgaccaatcagccgggcggcgatatcttcattgcgcgtctctttccatgctttgcgcagggaagattcctcaaagtgctggcggtcaaaccactcctgtagctcgaccagccctttacgggtgagatcgcgcgggcgattaataactgcctgcaatgccggttgcgcgttcggggaacgttgcaccagcgagtcaaaggcttcgaggaaatcctgcggcgtgtcgtaatcaccgtacagcgattttacactcaccacttcatcgtcgatatcgaggaagatcggcgcatcattcaggttgttgatgtccgttttcagcttttccagacgggcgataaagccaggcagtttgttaaagacttcggcgctccagtgcggccctttttcccgcaggcgcgaggcgaagccgttaaagttcacgcccgccgcgtcctggcatagctcatccagacgacgcacctgtttatctatcgtttcgctgcggtcacggttaaacgtggccagaccgatgatacgctggagcttcgccaccagttgttcatggctgtgctcggcaaaactgcggccatccgcttcggtgattttataggtttctgaatcggtaatttcattgaccagcgtttgcagttccaccttcgggcgcaccaccaccggacgcatggtgtcgacgctctccagcgtgctgtagatatcgacacagtcaaaaatcttaaagctggttttattcacctccgggcataagcgcgtggcgcggcctttcatctgttcgtacagaatgcggctgcgtactttacgcaggaacacgatattacagatcgacggaatatcgacgccggtcgtcagcaggtcgacggttaccacgatattgggcagccgctctttattgaagcgggtgatcatggtctgcactttgcgcgcgtctttatcggcatcaccggtgatcttgatgatcgcgtcgtgctccagttgcggatactttttcttgaacgcggcacgcagctcttccaccaccatatcggcatgggcattggtgacgcagaagaccagcgttttttgcgatccggtcgggtcaagataattggtgagttcgttacagacggcgcggttaaacgccgggatcaccaggccacggttaaagtcggcgacttcaaaatcctgatcgtcttccagggtgtcattgatcacttctccctgcgggctgatgcgctctacctgctcgcctttggagagataaaccccctcctgcgcgttgcgggtgatgatctgaataggcggatcctggtcgatcagaaaaccgtcgataaccgcggtacggtaggtataacggtaaaccggctcgccgaaaatctgcacagtatgtagcgccggggtggcggtgagagcgatttttaccgcatcgaagtgatcgagaatgcgacggtaggcagagacgtaatccagctggctgcggaactgcagttcgccttcggtctgctctttatcgagaatatagccgcgatgcgcttcgtcaacgacgatacagtcgtaacgggccaccggcatcggttcatctgattgcagggtgcgtttcaccagcgactgtacggtggcaacgtgaattttggtgctgtcttccgggaatttatccgtcagccctttaatgtcgaaaatgctgttgaaggtgtcgccgttaatacgcgtatcttcaaacgcgcccagcgcctgttcgccaagagaacggcggtcgacaaggaagagaatgcgtttaaaacgctgggactggatcaggcggaacatcatggcgattgccgtacgggttttaccggtaccggtcgccatcgccagcaggatctcttgttgccccttgacgattgccttttcaaccgcgcggacggcatcttcctgataataacgcaggcccagctcgctcatgccagggttatcggcaaaccactgattctgtttttacggttcgctgccgagcatttccagcagctcttccgggcggtgccactcgggtaaggctttcgacatattgcgggtatcacgcacgtcgcgataccagatgccgcttttggtcttcattgttgcgcggtattcgcgcccgttggtcgagtagcagaaggggattttaaaccgttgtttgccgctggtgtcctgccagctggtttcatactctggcactgcttcatgcacttcatccggtgagtagtgctcaagcaaggtttcccgcaggaagccattatcgaaacatttactgtagcgatacgactcattgagcctggcgggaacgtcgatattgttacgtttcgcctctaccaccgcgatgggtttgaggccgacaaacagcacataatccgcaaagccctgattacccgtttcatcttttccggtcggccattcggcaatggctttattgacgccgggttccggacgtgcgcctttggagaagcgcagggttttgctgtcggcctgccagcctgctttacgcagttgcgcatcaatcaggaagcgactctcttcttcgctaaggttgagtgtgcgcttgatggcctgatcggtaatttctttgtggtaagccttacgttcctgttcggtctgttttgccagttccgcgttcttctcggcgagctgtgcttccagtgccgcaaggcgagcctgggtttgcgcttcggtttcctgctgtttgccttccagaatggcgatatagccgttcagggcaaccagcttctgctgttgcgcttcgacttctgcctgagtctgcgctttttctcgcacctgctgttcaagctgttgttttagcgtcagcacttcctggtgatagaggttttcaccacgttccggcaacacaaacaccggcaccgggaagtcataatctttagtgaccagacggtagtaccagacagccaggcggaacccgagtcgcaggcacatctgggcatcgttgagatcgttatgatattcgtgcaccgcctggttaccaatgcggcgtaatttgtgaaatacagagaggatgttgtcatcaacaaaggcgattttgccgagttcacgcaggagatcgtgttgattctcacaaggggggatgttgagtaacagaccaagatgtttcgctgtggcttcgccaaacatacgcattttaatcagcgtcgtgttgggatcatccgggtagttattttccgccgcacaggcgatggcataagtgaagtcgttgacgcccttcaggaattcaaaattggatttattcatcattgttattaatccattgctgtgcgggcctgtccaaatatttaaggcccataacatctcatcttagctttctgtacctttccgggcaatgaccacggtcacagcaactgactcatttctaacgtgttcgtctatttttgtagtgctatagtagccgaaaaacatctacctgattctgcaaggatgtactatgacggttcctacctatgacaaatttattgaacctgttctgcgttatctggcaacaaaaccggaaggtgcagccgcgcgtgatgttcatgaggctgccgcggatgcattaggactggatgacagccagcgagcgaaagtcattaccagcggacaacttgtttataaaaatcgtgcaggctgggcgcatgaccgtttaaaacgtgccgggttgtcgcaaagtttgtcgcgtggcaaatggtgcctgactcctgcgggttttgactgggttgcgtctcatccccagccaatgacggagcaggagacgaaccatctggccttcgcttttgtgaatgtcaaacttaagtcacggccggatgccgtcgatttagatccgaaagccgactctcccgatcatgaagaacttgcaaagagcagcccggacgatcggttagatcaggcgctaaaagagcttcgtgatgcggtggctgatgaggttctggaaaacttattgcaggtttctccttcgcgctttgaagtcattgttctggatgttttgcatcgcctggggtatggcggccaccgtgatgatttgcagcgtgttggcggtactggagatggtggcatcgatggtgtgatatcgcttgataaacttggcctggagaaagtttatgttcaggcaaaacgttggcagaatactgtaggcaggccagaattacaggcattttacggcgcactggctgggcaaaaagcgaaacgtggggtgtttattaccacttctggatttacttctcaggcgcgtgactttgcccaatccgtcgagggtatggtgttggttgatggggaacgcctggtgcacttaatgatcgaaaacgaagtaggggtttcttcacgtttgttgaaggtgccgaaactggatatggactattttgagtgaaatatcaggccggatgcggctgcgccttatccggcccataaccccttacttcctcaaccccgcaaacgcagcccgaatctcttcctccggcagctggatcccgataaacaccatcgtgctatgcggtttttcatcgccccacggcctgtcccagtcggcgctgtagaggcgctggacgccctggaacagcaggcggttaggttcgccgtcaatccacagcatccctttgtaacgtagcagtttatccgccgactccagcagcaggttttccatcacgcgggaaacttcgctgatatctaccgggtaatccagttccaccacaatcgacgaaatatcgttttgtttatctgcgataaagtggaaacgcggtttggtgctgacgacgttttcttccagcataaaaccgttggtgttgaacagcaggcccagatcgatgtcgccgtgggtgacggtgtagaccggtgcgcgggcgttgatgcgcgccaggcgttcatgcagtttttctgcttcgcctgcgacgtcggttttggtcagcagaatgcggtcggcgtagccaacctgtgactgggcgatggtgaactggttcatctgctcatcggcatgtaccgcatccaccagcgcaatcacgccgtccagcagataacgctggcataaaacttcatgggagaaaaaggtctgaataatcgggccgggatcggccatgccggtgcattcaatgaccagacggtcgaactgaatattgcccttgtcgagattgtccagcaggtcgagtagcgcgtcctccagctcgttggagcgcgaacaacagatgcagccgttggtcagcgttttgatctgcgtggcgcggtcgccaatcagttgatcatcaacagagacttcgccgaattcgttttcaatcacggcaatcttgtagccgtgctgttcgttaagaatatggcgcagcagggtggtttttcctgcgcctaaaaaaccggtgagtagggtaactgcaatcgggttcatgctctctccattaacaacagcgcataccgcctttaccatcgccgccgtagcgcgcgttctggcgttcgcggaagaattcttcatagctcatgtacggcttgtcgggatggttggtcttcatatgctcgacgtagttgtcgtagtctggaatgccaatcaacatcttcgccgcctggccgagatatttttttgcctgtcctaagttaccaaacatagttcactctgataagaacaaagccccgccgaagcggggctaaacacggttagtggtgcgaagagatcttcacgccgccttccgggattggaacgtacggtgtttctttgtcagtacgtttgtcgctgttacgcaccgcaagccaggttttgaaaccgtagaagatgatgctgtacaccacaatcaggaacagaatactcagacctgcgttggtgtagttgttcacaacgatgtggttcatattggcaatctgctgcgccgtcaggtcagtaccgttagcaatcttctctttgtactggcttgccatgtagaagaagccttccatctgcgggttggtgctgaacagtttcaggcccagcgcccaggtggtgcagataagcagccatacagccggaacaacagttacccagatgtattgggtgcgcttcatcttaatcagcacaacggtgcccagtaccagcgctacggctgccagcatctggttggagataccgaacagcggccacaggctcttaacgccgcccagcggatcaaccacgccctgatacagcaggtagccccacagacccacacagcccgcagtaccgatgataccggcaaccagagaatcggtttttttcaggaacgggatgaagttacccagcaggtcttgcagcataaagcggccagaacgggtacccgcatccagcgcggtcaggatgaacagggcttcgaacagaataccgaagtgataccagaagcccatgtcagccatcggcagcactttgtggaacacgtgcgcgatacctaccgccagcgtcggcgcgccacctgcacggttcaggacagaaggctcaccaatgtctttcgcggtttgcaggatctgctctggcgaaatcacgaagccccaggagctgacggtcgctgccgcgtgtgcggtaacgtctttcagctgcgccatgatgatcggcgcgttctcgccacccatttcatgcaggttaggcatggtgatgccaaggccagcaggcggggtgttcatcgcgaagtaaagacccggttcgatgatggacgcagcaaccagcgccataatcgccacgaaggactccatcagcattgcgccgtagccgatgaaacgcgcgtcggtttcattagccagcagttttggcgtcgtaccggaagagatcagcgcgtggaagccagataccgcaccacaggcgatggtgatgaacaggaacgggaacagagcgcctttccacagcgggccagtaccgtcaatgtactgggtcatggcaggcattttcagttccgggttcagcaccacgatacccagcgccaggccgacgataacgccgattttcaggaaggttgccagatagtcgcgcggtgcgaggatcagccacactggcagcagtgcggaaacaaacgcatagccaatcagcgcgaaggtaatggtggtgtctttaaaggtcagtgccggaccccagtacggatcgtgagcaatcacgccaccgaagtagatagaggcaaccagcagcacgataccaatgacagagacttcacccacacgccccggacgaataaagcgcatgtagatacccataaacagcgcaatcggtacggttgagcaaacggtgaagacaccccacggactttcggccagggctttaaccacaatcagcgccaggacggcgaggatgatgatcatgattaagaaacagccaaacagcgcgatagtccccggtactggtcccatctcttctttgatcatctcaccaagagatgcgccattacggcgagaggagataaacagcaccataaagtcctgaaccgcaccggccagcacgacccccgccagcagccacagcgtgccaggcaggtagcccatctgcgcggcgagaaccggacccaccagcggaccagcaccggcgatagcggcgaagtggtgaccaaacaacacgtaacggttggtcggaacgtagttcagaccgtcgttgttaataaccgcaggcgtcgcgcgcgtggggtcgagtttcatcaccttctgggcgatgtacagactgtagtagcgatacgccaccagatacaccgatacagaggcgaccacgatccacagggcgctgatgtgctccccccgacgtaatgcaactaccgcgaggcagaatgcaccgatgattccgagaatcacccagggtatgtgcttgaatatctttttagtatccatagtaaaacctggcatgtattgattaatagttggccgaagccgttctaggtttgcgttgcgtttgaggaggtaaattgaccgctatcctgtagtgatgttgccagagttacgcgcgcgtaaagtaaggtaaataactgagtggttattttagggatgtaagcggtcagttttgcggttgagcggcaaaggcgtcgtttaagtgacgataaatatgtgattcatatcacatatttatattgtgaataatttatgtaaataatggctttttaaattcagagtgtgaataaaattcactcggcgtaatctccgcgggatattcataaagtttttcctttccaggccgaaaatcttgcatcggtccacaggaaagagaaaccatgttaaaacgtatcaaaattgtgaccagcttactgctggttttggccgtttttggccttttacaactgacatcaggcggtctgttctttaatgccttaaagaatgacaaagaaaatttcactgttttacaaaccattcgccagcagcaatccacgctgaatggcagctgggtcgcgttgttgcagacgcgtaacaccctcaaccgcgcgggtatccgctacatgatggatcagaataatattggtagcggttcaaccgttgctgagctgatggagagtgccagtatttcgctgaaacaggcggaaaaaaactgggcggattacgaagcgttgccgcgtgacccgcgtcagagcaccgccgcagcggcagagatcaaacgtaattacgatatttatcacaatgcgctggcggagctgatccaactgttaggtgcaggcaaaatcaacgagttctttgatcagccgacccagggatatcaggacggtttcgagaagcagtatgtggcttacatggagcaaaacgatcggctccatgatatcgccgtcagcgataacaatgcctcctacagccaggcgatgtggattctggtgggcgtgatgatcgtcgtactggcggtcatcttcgccgtctggttcggtattaaagcctcgctggtagcgccaatgaatcgcctgattgacagcattcgtcatattgcaggcggcgatctggtgaaaccgattgaggtggatggctctaatgagatggggcaactggcagagagtttgcgccatatgcagggagagctgatgcgtaccgtcggtgatgtgcgcaacggggccaatgccatctatagcggtgccagcgaaatcgccaccggcaataacgatctctcttcgcgcaccgagcaacaggccgcttcgctggaagagacggcagccagcatggagcaactgaccgcaacggtgaagcagaacgccgaaaatgcgcgccaggccagccatctggcgttaagtgcttctgaaacggcgcaacgcggcggtaaagtggtagataacgtggtgcagactatgcgcgatatctccaccagttcgcagaaaatcgccgatattatcagcgtaattgacggcattgccttccagaccaatattctggctttgaacgcggcggttgaggctgcgcgtgcgggtgagcaagggcgcggttttgcggtggtcgcgggagaagtgcgtaatctggcccagcgcagcgcccaggcggctcgtgaaattaaaagcctgattgaagactcggtggggaaagtggatgttggctctacgctggtcgaaagcgccggggaaacaatggcggagattgtcagcgccgtgacccgcgtgacggacattatgggcgaaattgcttctgcttctgatgagcagagccgtggtatcgatcaggttggcttagcggttgctgagatggaccgggtaactcaacagaacgccgcgctggtggaagagtctgccgctgccgccgccgcgctggaagagcaggccagtcgcctgaccgaagcagtggcagtgttccggattcagcaacagcagcgtgaaacatcggctgtggtaaaaaccgtgacgccagctgcgccgcgtaaaatggccgtggcagatagcgaggagaactgggaaacattttaatcgccatgaaaatgcccgataagcaaaatgttatcgggcataaggagattaatctttacgtgggtcgttgatcggctgacgaaccaggaagatgtacgccagtgcccccgctgcggtgacgcaaccgcagatgattagtgccagacggaatgagtgggtggtatcaacaataaaaccagtaatgatcggcgcaaaagaggcgcagatgaagctggcaaagttctggatactgcccaccgacgcagtcatgcgagaagcaactgcgacgtggatcaagccccagcaggatgttccggcaaagtgaatacagaacagtgccatgccaatcagcagaaccgccgtcatggatgttgtcgcttgtggtactatcagcgtaaaggcggcagaacagaacatcccggcaataatgcagatcttacggcttttaatcggagccattccccctttgaccagccagtcggtaacgtaaccgttgaccagcatcccggcagccccaaacaggaaagggatagccgccatcaaccctgtgctttttaaatccaggttataggctgtttgcaggtaaccaggaagccaggccagatacagccacgcagtgtagttgatgccactgaatccgagcatcattccccacattgtacggttacggaacaggctgcgccattcggcaaaactgagcggatctcggcgggcattgacgctacctgcattgagataagcttgctcaacggcagtcagttctacgtgctcgcggttgcgatagagcatataccagccgatggcgagaaaaatccccagtacaccaatggtaataaacatcccgcgccagcccatcaccagcatcatcgccgccagaatcggtgggcttacggcaacgccaatggtagaagctgcgttgaagaagcccatcgggcgtccgcgctctttgatgttgaaccagtcgttaatgacttttacaccgcatgggttcatcggcgcttcaccaatccccataccgatacgcaccaacacgaactgcgtaaagttgtgcaccatgccagacattgcctggaacagtgaccagaagaacatccccagtcccagcatcaggcgtgggcctttacgatccaatagtgggccgcaaggaagttgcgcaatcccgtaagcgagtgaaaacacggagagcaaagcgccgatttcggtggcacttaatcccaattcttcacgaatcgttaaatttgctaccgacagcgaactgcggtcgagataattgattaccgccgcaaaaaataataacaacatggcggtggtttgaatgcgtttaattcgggtactgcgttgaactaatccatctggtggcacgggaatatctgccgacgaagatggagtaaatgaagaacgcggatcgatggtgatattttctttttccacgccggactcctgtatttataattttaattgtttacgtaattgtgcattacgcaaggttgacattaacggcaggttaaagttttaggactttactaccgctcacaaaaacatttttagtcgactgattgtgagcataggtaagcgggaatttcccggtatttatcttttgataaaaccgtgcacccgctaatagtttgctgtttttaatccgtacttaatgagcataacgcgtgttctcattaatggatcgaatcattgattgtttagctgaattcaaatggttacggagcgcaagggtggcatcaaggtcactgcggcaaatcagagcgctgagaatggtcatatgctcatcgacggcaatgatattgcgctgtttaagatcgctttcgtcccattgatagtgaaaatgaaagatgactgagatgatctcaagcgattgatcaaaaaagatattgtcggcagctgaaagcagtaaggagtgaaaatctctgtcaagttgcgagaacatgcgaaagctattgccgatgttgtcacgcagtagccgatgacgttcgagcatggttttcgcctgcagccagcggggatcatgatcaggcaggttgagaaagtgctgaagtgaatgtgtttcgagcatttcgcgtagctcaaacagctgctcggcgtaggattgatcgaattgcttcatgctccactggccgcgcttttcgctgtgaataagattataacggccgaattttaaaagatattctcttactacaaccgggctgacacccgcggcccgagccagttgcagttcagaaaacgtttcccctgggcgtaactggcgctggtttatcatcgtgaaaaaagcctgctcaaacactttgttttgttcactcattgaagcggtagtacaggcgaaaccgtcatcatggtcaggtttacgcgcaataacatagtcgtttccaacctgcgtcaagacgccgcattcgcgtaagtggctgagaatatgacgcactgtggtgcggctgatgttgtacatttccgccagcgcactttgcgatggaagtggggaagggatatgaccccgcgccatatcatcaatgacctggttaatcacattgtggcgtaaattttgtgaacgactcatattttcctccttgtgagtccattaaaacccgatttaaaacatttttatgcgtgtgttttcacaaaaaagattttccgttccgctgccatttttcattttcattgatatctaaggcaacaaaaagtggagagccgaatcatgtctacgatgaatgttttaatttgccagcagccgaaagaattagtctggaaacaacgcgagatacctattccgggtgacaatgaagcattaataaaaattaagtctgtcgggatttgcggtaccgatattcatgcctggggtggaaatcaaccattttttagttatccacgtgttttaggccatgaaatatgtggggagattgttgggctgggtaaaaatattgctgatcttaaaaatggtcagcaagttgctgtgatcccttatgttgcctgtcagcaatgcccggcgtgtaaaagcgggcgtaccaattgctgtgaaaaaatttcagtcattggcgtgcatcaggatggcggttttagtgagtatttgagcgtgccggtggcgaacattttgcccgcagacggtattgacccgcaggcggcagcattgattgaacctttcgctattagcgctcatgcggtgcgtcgcgcagccattgctcccggcgagcaggtgctggtggtcggggcggggccaatcggtctgggcgcggcggcaatcgctaaagccgatggcgcacaggtggtggtggcggataccagtccggcgcgccgtgaacatgtggcaacgcgtctggaattacctttactggacccgtcagccgaagattttgacgcgcagctacgggcgcagtttggtggttcgctggcgcagaaagtgatcgacgcgacaggtaatcaacatgcgatgaataacaccgtgaatttgattcgtcacggcggcacggtggtatttgtcggcctgtttaaaggtgagttgcagttctccgatccggaattccataaaaaagaaacgacgatgatgggcagccgcaacgccacgccggaagattttgctaaagtcggtcgactgatggcggaaggaaaaatcactgctgacatgatgttaacccatcgctatccgttcgccacgctggcagaaacctacgagcgcgatgtgattaacaatcgtgagttaattaaaggcgtaattactttctgataaggcgagattattaaagttgccatgcagcgtccggggaagtgttgggcgctgttttttttgtttcttaataatgtgttgtaagccgtagaaggcgtgtaggtcgcaccctatgcgacctacacatcagtcaggaattacccttcacgttctaccactttaatttccaccatgccgatcccgagcttacgcggcgagtgtccgaggatattcccttcgttggttgagacaggttccggcggcacaattaccagtgtgtcggcatcggttgggttatcgaaatgcagtgtggtggtggtcacttcattgcccagcacaagagtttgttcttcattgcctacgcgtaccggaataggacggctggcgttattgccgtatgctttggcggtaatcaccaggtcaaatttcttcggcagcggatgcttgtactcgatttttacttcatcgcccagctgcgcgttggaccagcggccccacgactccggacgggaaatcccgctaaactgtttcacctcttctggcgcaccggcgacgttaaagatgaaactgtcggctttgtagcgaatatcgttatcaacaatcttcagcgtatcgacattgcctttgtaacgcgccatgtcgatgaccgtatctttaaatgccgttttgccctgccatgttgttttgtcaacatgctgaacaatttgctgaccgccaagctgcccttgcgagacacaccagtcggtggaaagtgccagttccggagcccagagttgtgccatcttgtagcaacggtcaacccagacgaaattgtcgcgtggagcgaaatcggccagctggaaacgcagcggtgctgagtattcgctttccggcagcggttccacgcgtttgtctgaaacccgcaacagcagcggcaaacggaaatggctacccgagaaggcaatcatgtttttctgctggtcgatggtgaactctttcatctctttagggaatttccacaggcggatgatatctggcttccacgccaatgttttctctttgatattgaggaagatttccgacatcgactgcccggataaactgctacgaccaagtccgagatagttatcgccaccgagaatgtccagcaccgtcgcgccgttatccatcgtgttacgcttcactgccagcgtctcttgctgcggcttgtcgccacgaatgacaaaaaacaggttattgcgatcctgcttattgaggtatttccacgccgtgttgttcatcgctaaatggtcagaagagacgacgatgacggtatctttaaaccacggtgacgctttgattttgttgataaacgtcgcgatgttctcctggctgcaacttaccgcgctgaatgactgattcggtttaccgtcaaaatcatattttttgcggttacaggtacgagagataaaaccatccgggtgatgggtatcgactgtcagggtaaacagtgagaatcgctgacctgagcgggaaagctcttcaaactttttccacgcttcatcgagaacggtatcgtcgtagaatccccagtcgttgcgatagtgcgggtcggctaccacgcttttcagctcttctgagccgtataagtggtcgaagccatgcgacttcaggaacacatctttaccggcaaaacgcagattcgcgccctgcacgaaatagttctgataacccgagtttttcaggatatctcccagacagatgttctgcgggaagaagctggagacagaggcggaggcgttgccttcaaagggggcaaacagcggtatgccgcactgagaagccaccatgcccgcaatcgtgtaatctgttcccggcagctgctgcgtgtggctgaaatccaggccttcatttttcaacgcgcccagttcaggcgtgagatccgggaaagcctcgttatcaaaataggtccgctcgagactttcgccgtagatataaaccaggttgagtttcgggtcagggatagttttcgacggctctttataataagccgcaaagtccgggtcgccgtcgcgtgactgggatttcaccagttccgttatctgacgaaatgccgggctggcgtccaccgaacccagcgccagtaagagcgccagcaggctgtaaccaaaatggtgcggatgatggcgacgacggcgcaggatccagcccagcgcaccgaacaccgctgtcagccccagcacaatgccgatacccggcaaaatgtatttgctgacgccagcaccggtcaggctgttggttaaggtatagagaaccgcgtcgttaataccatcgccagtaaaatagtcgctggcaaacagggtgatatttaaaacgacaaatagccccagcaccgttaacgtggctgcaaaccaccaggtgttacgtcccgctttccatgcgtaaatcagcacagaggcgagaaaaagggcgaaagagagtagttctgacaacgggcgatcctcactaaaccgggccgtttagccaacgtttaagctttttgagaagcacaatgtaatggcgtcgccatattgctgcaattctagtgtcaaaaaaatgcgatgttgttaggaattagtttataaacagacttttttgattacggtcacttcccgtgtaacaggggtaaaaccgtccaggagcagggaaaagggcaggagagagccgcgtcagccgggtaacagctaaaacgcggcgtttcgcggttcaggaaatgaagttcagcccctgttttaacaccagatcgcaggctttggttttcaccttttctgccagcggagttgttccgatgttatccagattgagttgctgaccatctttggttttcagcaaaccctgaatgccgtccagatagttggtgtcttctttttgctcttcactgttcaggcccagcttttccagcacctggttcttgatgttttcggcatcggttaccgacgccagcttttgcttcgcgcagtattgcagaatgcctgcggcattgttcatgttatctgcgcttaaggcctggtttccgctgctaagcaagttagttaatgacgcgagcgaccaaccgccttcctgtgtcgtgctgttttggttgccaagttcgctggcggcgctggagagcgcatctttccaggacgcagcatgcaccccggtggaaattaatgcgctggcggcaatggcacagcacagaagatgtttaacagttttcatcatcattactcaaggtggaattgtgtcgcagtataccgccagaaacggggattaatactctttacctgttacccggctacggtagctatcccagttgaagatcacccacaaactgttacccaggcgcatacggtccatcacgcgttcgcccagcaacttggtcatctcttccatattactgttggtcagcatcccggttgggcgtttggaagaagagcggcgatcgacgatctggttgatgatcactttttcgtatttcgattcggtctgcacgccgatctcatcgatcaccagcagatcaacgttgctcagatcgttaagcagttgttcttcgctggtaccgctattcctgaaggtatctttcatcgccgacataatatcggccacggtgatgatcaatacggatttaccgcgtagcagcagctcgttgcagattgccgccgccagatggtttttgccggttcctggcttaccagaaaagatgaagctggcgatgttgccgtcaaactcttcgacatactggcgcgctttgcttaacgcattcatctgcccttcacactcaacgcgatagttctcaaaggaacagttctgatgcagtggacgaataccggagcggttaaaggtgcgctgcattttcatcgcccgattttcacgttcgagagcggcggagcggatcgctccttgttctttttgccaggccagtagttcttcacccgttttgaatgcgggtttgatatgggcaggcatcattttttgcaggcgttgcatcaggtcgccaacgtttttcatcgttaccctctgaatcctggtggaatttggctgtcaggttcgctgaccgtattcacatctcgtttcggcagtccgccgttgctggcacgaccgatttgcaggctgcgcgccagtttttgttgccactgcacatggtgaaagactttaccttccgcctgccagtaggcaatgaatgaggccagttcttcggtggtcaccggctctcttagcgccacgccccatagcgccgccaggcggataaaatcggcatcgggttgccagtccggatacatggcgaatttccccatgggtacagcaacgggagcggcttgcggttcctgatagagttgatcgtccagagcgacatcgcttcccggacgcgccagcttttcttccagcgccagcagttcagccaggcgtgcaggcgtgacggcataaaacgccggggcattgttagcaaatacggcaaccacaccgccttcagcttttgccagaacggtttggtgatcgtgtaccagggcgtcaataccaacgacgtccggggtcaaaactctggaagacatactgtttctcaaatatggaacgatgaacgagaagggagataacttttatagtaacacacggaggagaggaggctgtctctcatccgtgtgcttaagcgaggcaattttatacgcgagggcgcttgcggtacaaccataatccaggaatggaaagaccgatggataacgcaccaacaatcgatgaagctgtaagaaagttggttaacagggtaatcatcaacggttcgctgtaacctaactggctgatttttaccgccgaaatcattgcggtataagccgatatgcccgggaacatagggataacggccgccacggtaaacactttcggatgcgccagataccagcgcgaccattgaataccaatggtaccgaccagcatagaagccataaaggttgaccactcaatattcaacccgctggtcatcaagatcattcgggaaccatgacctatcgagccaagcagcgcacaccagcgtaacgcccgcacgggaacgttgaacaccatcgcaaagccgaccgcaggaatggcggcgaggatcatatcctgcgccaacgctaacagaaattcgatcacacccatccgcgtagcccccaaatcgtcagtgccatcactacgccgacgcaggtagccagtgtcagcagactggcgatcgcccagcgtgccagtccggtattgatgtggcctttaaacatatcggcgacggcattaatcaacggaaagcccggcactagcagcagaacgctggcggccatcgcaatggtgggggtattgctgaaagtggggagttgcaaaagcaatccggaaatggtggtggcggcgaaagcggtaaggcaaaagttgatctgtggatgaagatgacgttgtgccagcagctggcggatatacatcgcggtcgtactggcaaagaaggtgatgacggcaccatcccagccaccgttattgagtttacagaaacaggcgcaagaaaggccaaccattaaggctaccagctatcttgggtaacgtaatggctgaatttggctaaatcgtttctctacgcctttgtaatccagcagatgatgctccgcaagaatcacaatgtgctggacttcagtcaccacatgcatattaatgccgcgatcgtgatttttacgtgtcgatgtcaggcattgcccatctttaatagttgtcagcactatggcgttcgaagagatagaactttcgacgctgtccattcccagtgcccgacccagtcgtgaggaaagctcatcaaccaacgcgctttccgcaccatgttgcaaaagaaataatccacactggatacaaagccgtgttacggctcgctgttgctcagtttgcataactcgccctttgtcatagacgtgctgcgtattgttcagataatgagaatccatttgtatcatgaagcacggttgttttgcggtaggttaagatcaaaattgcgctgattaatcctggttatcgggagaagctcggtgataaaaagcgaattatctctcgccgcaaacaaactatcacatgaatattatcatcataatgaatttattgtttggcctttacgaatcaggataatagataaccgggcacgttttttaatgttaacaagctaaaaccatcagatttcattgaataaatattggttgtgtgattttgcattctgcgggaagggatatcatttaattataaattaaatgaatgtgatttctgtttttcattaagtattcctaacaacttaatgtagatattttaaatgtctccaggctatttcaccaggttatcatttgatgctaaccttctgacacatgcagtggagttgttgtgcagcaggagtatgctgatatgaaagtgaatgctaaggataatttattcgcttaatctattaatttgctggaaacatttaaggaatgaatatcctgaataaaccatcataatttttagacagtggatgtggaggaaatatgttgccaggatgctgcaaaaatggaattgttatcagtaaaatacctgttatgcaagcagggttaaaagaggtcatgaggactcacttccctgaatatgaaataatatccagcgcctctgcggaggaccttaccttattacaattacgtcgttccggattagtcattgctgatttagccggtgaaagtgaagatccacgttctgtttgtgaacattattattctttaatctcacaatatcgggaaattcactgggttttcatggtgtcacgctcctggtattcccaggcagtagaactgctcatgtgccctacggcgacgttattgtctgatgttgaacccattgagaatctggtcaagaccgtacgttccggcaatacgcacgcagagcgtatcagcgccatgctgacctccccggcaatgactgaaactcatgattttagctatcgctccgtcattctcactctttcagagcgcaaggtactgcggctattaggtaaaggatggggcatcaaccagatagcttcattgcttaagaaaagtaataaaactatcagcgcccaaaaaaacagtgcgatgcgtcgactggcaattcacagcaacgctgaaatgtatgcatggataaatagcgcgcagggtgcaagagaacttaacttgccttctgtttatggagatgccgcagaatggaacacagccgaattaagaagagaaatgtcgcactcatagaaaaatgcgtcatgagtagtatcggtattgagagtttattcagaaagtttgcgggtaacccttataagctccatacctataccagtcaggagtcatttcaggatgccatgtcgcggatctcgtttgcggcggtcattttttctttttctgccatgagaagtgagcgcagagagggattatcttgcctgactgaactggcgattaagtttccgcgtacccggcgtttagttattgcggatgatgatattgaagctcggctgattggttcattgtcgccatcaccgctggacggtgtattaagtaaagcgtcaacgctggagatttttcatcaggaactctttttgtcattaaatggtgtacgtcaggcgaccgaccgactgaacaatcagtggtacattaaccaaagccggacgttaagcccgacggagagagaaatattgcgctttatgtcgcgtggctactcaatgacacaaattgccgagcagcttaaacgcaatatcaaaacgatccgtgcacataaatttaatgtgatgtcgaaactgggcgtcagttctgacgcagggttgttggaggccgcagatattctgttatgtatgcggcattgcgaaacaagtaatgtgttgcatccctattaatccgcatgatgccgggtttacttccccggcagtgctttcatttcagcgtacaatcgccacattgctgcacatccggtaagcgataacgctggcagcaagtgcggcgcaccagcaggccgtcgcgcagtaccacggtacgccagagtggattatcttcaccgttcgtgagcgttttctcaaaaaagagggcatggcgcagcgattcaacagtagcctcgccgagcagttgcttcatctcagtgagataccagttgatcaaataaccggtattactccagataagtttgccgttgatctctccggtcgcttctagtgcttgcacaaccggaaccagcgcctggctgattaacgtttccattcgatgctgcggcgaatgtggtgttgcgtttttatcttcacacacatcgacccagaaacaggcgacgcgtccggtttcgtgaaactcagcatggaaatgttccggcgacacatctaatgccttttcctgcgtcagtagcgccagcattaatggtggcaccatcaggccgatataccattgtgcccatagtgagatcagcggtttgttctcgcggatcatcatcggttggttgcgatagatatgatcggaatagaccgccagcagagaacttagcacattcggtgatgaccattgcgccagcgtcatggcgttaagtggggcaggttcatccaggcggataaactccagcaaatgttcacgatgttttgcgatcgtcgcccgcacggcttgcgcaagcgtgggatcctgcggctggagatgcgttcgccagatgacatcttcatagagcggtgcggaacgataggccataatcgggatagtaatctaaatgataatgattgctaatcatagcgataggtttacccgatagcaagggatttatctggcttgcaaatgataaaaattatcatatgatattggttatcattatcaatgaaagagatgaaatcatgttgcaacgtacgctgggcagtggctggggagtgttgctgccgggattgctgattgcagggctgatgtatgcggatttatcgtcagatcagtggcggattgtcattctgatgggattagtattgacgccgatgatgctgtatcacaaacagttgcggcattacattttgctaccatcgtgcctggcacttattgctggcatcatgctgatgataatgaatttgaatcagggatgaaaaatcaaggaagaaacaagaaaggaagtaaagataattggtgcgaggggggggacttgaacccccacgtccgtaaggacactaacacctgaagctagcgcgtctaccaattccgccaccttcgcacagtcatcttactttttttgatatcgcctcgtttggtgcgaggggggggacttgaacccccacgtccgtaagaacactaacacctgaagctagcgcgtctaccaattccgccaccttcgcccagtgcgagcaatatcaacgtggtttttggtgcgaggggggggacttgaacccccacgtccgtaaggacactaacacctgaagctagcgcgtctaccaattccgccaccttcgcataccatcaattcttaaaaagaattgctaccacggaggcgcattctagtggttttcagcttttcgtcaatagttaattatcgacagaggtgtaattgctggaaaaatgtccatcaggaaactagcgtgcaggtttggtatgcatgcgggggcagatgccagatgcgacgctggcgcgtcttatctggcctacgaagggctaacgtgcaggttttgtaggtcggataaggcgttcacgccgcatccgacacggtattcggcgagataattaacctttcttcgcctggcgggtcataatggcgcgatacaccttgaagcgccctgtttgcgcgatcacttcgtggaagccaaatgtctcatccagcacgtccggataaggcaggaaggcgttcgctacaattcgcagctcgccgccgctattaagatgacgcaccgcaccgcgaatcagcgtttgcgccgcatccaggctggtttgcatcccatcgtggaacggcgggttggagatgatcatatcaaaacgacctttcacctcggaaaagacgttgctggcaaagacttcaccttcaacaccgttggccgcaagtgttgcgcggctggcttctaccgccggggcagagacatcgcacaaggtgagacgaattttcggcgaatggcgcgcaaaggcaactgaaagcacgcccgcgccacagccgacatccagcactttacctttcgtgtgcggagttaacgtcgagagcagcaactggctaccgacatccagaccgtcgcggctaaacacgccaggcagcgttttgaccgtcaggccatcgacgctgtattcgccccagaatttctccgcatcaaataccggctgtttttccagacgaccaaaatagaggccacagcgacgagcgctgtcgactttattcaacggcgcataatctgccagcatctgctcggcgctgcgcacgccgctgcggttctcgccaacgacaaaaatatctgtccccactggcagcagagaaagtaaattcatcaactggaactgggcttccggtttgttcttcggccagtagtaaatcagcgtatcgcaatctgcgacgtcatccgccgtggcgaccagactgaaacgggcgttatcccccatctggcggcttaatacctgccagtggtggaattgctgggtatgagcacggctggccgcggtatctaaacgcgcgggcaggtcatcctgtaagtctccggcaaacagaatacggctttgttcgaaatcatcactgtgacgcagcaagacttcacttgccggggtaaatgcagacatggaatgctcctcaattgatactggcggcgattatagccatatgttggcgcggtatcgacgaatttgctatatttgcgcccctgacaacaggagcgattcgctatgacatcccgacgagactggcagttacagcaactgggcattacccagtggtcgctgcgtcgccctggcgcgttgcagggggagattgccattgcgatcccggcacacgtccgtctggtgatggtggcaaacgatcttcccgccctgactgatcctttagtgagcgatgttctgcgcgcattaaccgtcagccccgaccaggtgctgcaactgacgccagaaaaaatcgcgatgctgccgcaaggcagtcactgcaacagttggcggttgggtactgacgaaccgctatcactggaaggcgctcaggtggcatcaccggcgctcaccgatttacgggcaaacccaacggcacgcgccgcgttatggcaacaaatttgcacatatgaacacgatttcttccctcgaaacgactgatttaccggcggcttaccacattgaacaacgcgcccacgcctttccgtggagtgaaaaaacgtttgccagcaaccagggcgagcgttatctcaactttcagttaacgcaaaacggcaaaatggcggcgtttgcgattacgcaagtggtgctggatgaagctacattgttcaatattgcggtcgatcctgactatcagcgtcagggattgggaagggcgctgctggaacatctgatcgacgaactggaaaaacgcggcgtggcgacactatggctggaagtccgtgcttcaaacgctgccgccattgccctgtacgaaagtttaggctttaacgaggcgacgattcgccgcaattactaccccaccacggacggtcgcgaagacgccatcatcatggcgttgccaatcagtatgtaatacaaggtggaataatgaagtgggactggattttctttgatgccgatgaaacgctgtttacctttgactcattcaccggcctgcagcggatgtttcttgattacagcgtcacctttaccgctgaagattttcaggactatcaggccgttaacaagccactgtgggtggattatcaaaacggcgcgatcacttcattacagcttcagcacgggcggtttgagagctgggccgaacggctgaacgtcgagccaggtaaactcaacgaagcctttattaatgcgatggcggaaatctgcacgccgctgccgggcgcggtttctctgcttaacgccattcgtggcaacgccaaaatcggcatcatcaccaacggctttagtgccttgcaacaggtgcgtctggaacgcacgggcctgcgtgattacttcgatttgctggtgatttccgaagaagttggcgttgccaaaccgaataagaaaattttcgattatgcgctggaacaggcgggcaatcctgaccgttcacgcgtgctgatggttggcgacactgccgagtccgatattctcggtggcatcaacgccgggcttgcgacctgctggctgaatgcacaccatcgcgagcaaccagaaggcatcgcgcccacctggaccgtttcttcgttgcacgaactggagcagctcctgtgtaaacactgattgcctcccccccgttgatgggtaaaatagccgcaatttttcgttttcaacaagcgcggcgcgatgccgcttactcaagaagaaagaattatgacgttgtctccttatttgcaagaggtggcgaagcgccgcacttttgccattatttctcacccggacgccggtaagactaccatcaccgagaaggtgctgctgttcggacaggccattcagaccgccggtacagtaaaaggccgtggttccaaccagcacgctaagtcggactggatggagatggaaaagcagcgtgggatctccattactacgtctgtgatgcagtttccgtatcacgattgcctggttaacctgctcgacaccccggggcacgaagacttctcggaagatacctatcgtaccctgacggcggtggactgctgcctgatggttatcgacgccgcaaaaggtgttgaagatcgtacccgtaagctgatggaagttacccgtctgcgcgacacgccgatcctcacctttatgaacaaacttgaccgtgatatccgcgacccgatggagctgctcgatgaagttgagaacgagctgaaaatcggctgtgcgccgatcacctggccgattggctgcggcaagctgtttaaaggcgtttaccacctttataaagacgaaacctatctctatcagagcggtaaaggccacaccattcaggaagtccgcattgttaaagggctgaataacccggatctcgatgctgcggttggtgaagatctggcacagcagctgcgtgacgaactggaactggtgaaaggcgcgtctaacgagttcgacaaagagctgttccttgcgggcgaaatcactccggtattcttcggtactgcgctgggtaacttcggcgtcgatcatatgttggatggcctggtggagtgggcacctgcgccgatgccgcgtcagactgatacccgtaccgtagaagcgagcgaagataaatttaccggcttcgtatttaaaattcaggccaacatggacccgaaacaccgcgaccgcgtggcgtttatgcgtgtggtgtccggtaaatatgaaaaaggcatgaaactgcgccaggtgcgcactgcgaaagatgtggtgatctccgacgcgctgacctttatggcgggtgaccgttcgcacgttgaagaagcgtatccgggcgatatcctcggcctgcacaaccacggcaccattcagatcggcgacacctttacccagggtgagatgatgaagttcaccggtattccgaacttcgcaccagaactgttccgtcgtatccgcctgaaagatccgctgaagcaaaaacagctgctcaaagggctggtacagctttccgaagagggcgcggtgcaggtgttccgtccaatctccaacaacgatctgatcgttggtgcagttggtgtgctgcagtttgatgtggtggtagcgcgcctgaagagcgaatacaacgttgaagcagtgtatgagtcagtcaacgttgccactgcccgctgggtagaatgtgcagacgcgaagaaattcgaagagttcaagcgtaagaacgaaagccaactggcgcttgatggcggcgataacctcgcttacatcgctaccagcatggtcaacctgcgcctggcacaggaacgttatccggacgttcagttccaccagacccgcgagcattaattcttgcctccagggcgcggtagccgctgcgccctgtcaatttcccttccttattagccgcttacggaatgttcttaaaacattcacttttgcttatgttttcgctgatatcccgagcggtttcaaaattgtgatctatatttaacaaagtgatgacatttctgacggcgttaaataccgttcaatgcgtagatatcagtatctaaagccgtcgattgtcattctaccgatattaataactgattcagaggctgtaatggtcgttattcatcactcatcgcttttgtgatggcgaccattgacttctgtagagggtgaagtctctccctattcagcaatgcaacctcgtgttgccaggctcaaattacgagcaaacatacaggaataaatcgatgactatgacaagactgaagatttcgaaaactctgctggctgtaatgttgacctctgccgtcgcgaccggctctgcctacgcggaaaacaacgcgcagactaccaatgaaagcgcagggcaaaaagtcgatagctctatgaataaagtcggtaatttcatggatgacagcgccatcaccgcgaaagtgaaggcggccctggtggatcatgacaacatcaagagcaccgatatctctgtaaaaaccgatcaaaaagtcgtgaccctgagcggtttcgttgaaagccaggcccaggccgaagaggcagtgaaagtggcgaaaggcgttgaaggggtgacctctgtcagcgacaaactgcacgttcgcgacgctaaagaaggctcggtgaagggctacgcgggtgacaccgccaccaccagtgaaatcaaagccaaactgctggcggacgatatcgtcccttcccgtcatgtgaaagttgaaaccaccgacggcgtggttcagctctccggtaccgtcgattctcaggcacaaagtgaccgtgctgaaagtatcgccaaagcggtagatggtgtgaaaagcgttaaaaatgatctgaaaactaagtaattcgtcgtaattcgtcctcccgaactttgtcgggaggcgcgatgtgcaccacactaaaaatatcgcattgagtgattttcacgctcatatcaagcggtgacattaactatggtaaaggagacgcttatgtttcgttggggcatcatatttctggttatcgcgttaatcgccgccgcacttgggtttggtggtctggccggtaccgctgcaggcgcagctaaaattgtctttgtcgtcgggattattctgttcctggtgagtttgttcatgggccgaaaacgaccctagatttcagaccattaagaaaattttatccaaagccagtccagcggactggcttttgcggttttagcgaataataaattgcgttactttgtcattctttcacaacaaaaacaggaaggcagaggtggggcagcgaatacctgtaacgcttggtaatattgcgccgttgtcgctaaggccgttccagcctggacgaatagctctggtgtgcgaaggcggcggacagcgtggaattttcacggctggcgtgctggatgagtttatgcgcgcgcagtttaatcctttcgatctttatctcggcacatctgccggggcgcagaacctctcggcgtttatctgcaatcagcccggttacgcgcgcaaagtcatcatgcgctataccacaaaacgcgaatttttcgatccattgcgctttgtccgtggaggaaatcttatcgatctcgactggctggtggaggccactgcaagccagatgccgttgcaaatggataccgccgcgcggttgtttgacagcggcaaatcgttttatatgtgcgcctgtcgtcaggatgactacgcgccgaattactttttaccaaccaaacaaaactggctggatgtgattcgcgcctccagtgcgatacctggcttttatcgtagcggagtgtcgctggaaggcattaactacctggatggcgggatcagtgatgcgattccggttaaagaggcggcaaggcagggcgctaaaacgttggtcgtcattcgcactgtgccgtcacaaatgtactacacgccgcagtggttcaaacgcatggaacgctggctgggtgacagtagcctgcagccgctggtcaatctggtgcagcatcatgaaaccagctatcgtgacattcagcaatttattgagaaaccaccgggcaagctgcggatattcgaaatttatccgccgaagccattacatagtatcgcgcttggcagtcggattccggcgctgcgtgaagactataaacttgggcgtttatgcggtcgttatttcctcgccacggttggcaagctattaactgaaaaagcgccgcttacccgccatctggtgccagtggtgacgccggaatcgattgtcattccgcctgcgccagtcgccaacgatacgctggttgccgaagtgagcgacgctccgcaggcgaacgacccgacatttaacaatgaggatctggcttgatttgccgttttatcgacacccactgccattttgatttcccgccgtttagtggcgatgaagaggccagcctgcaacgcgcggcacaagcgggcgtaggcaagatcattgttccggcaacagaggcggaaaattttgcccgtgtgttggcattagcggaaaattatcaaccgctgtatgccgcattgggcttgcatcctggtatgttggaaaaacatagcgatgtgtctcttgagcagctacagcaggcgctggaaaggcgtccggcgaaggtggtggcggtgggggagatcggtctggatctctttggcgacgatccgcaatttgagaggcagcagtggttactcgacgaacaactgaaactggcgaaacgctacgatctgccggtgatcctgcattcacggcgcacgcacgacaaactggcgatgcatcttaaacgccacgatttaccgcgcactggcgtggttcacggtttttccggcagcctgcaacaggccgaacggtttgtacagctgggctacaaaattggcgtaggcggtactatcacctatccacgcgccagtaaaacccgcgatgtcatcgcaaaattaccgctggcatcgttattgctggaaaccgacgcgccggatatgccgctcaacggttttcaggggcagcctaaccgcccggagcaggctgcccgtgtgttcgccgtgctttgcgagttgcgccgggaaccggcggatgagattgcgcaagcgttgcttaataacacgtatacgttgtttaacgtgccgtaggccggataaggcgttcacgccgcatccggcagttggcgcacaatgcctgatgcgacgcttaacgcgtcttatcatgcctacaggtttgtgccgaaccgtaggccggataaggcgttcacgccgcatccggcagttggcgcacaatgcctgatgcgacgcttgtcgcgtcttatcatgcctacaagtctgtgccgaaccgtaggccggataaggcgttcacgccgcatccggcagtcggcgcataatgcctgatgcgacgcttgtcgcgtcttatcatgcctacaggtttgtgccgaaccgtaggccggataaggcgttcgcgccgcatccggcagttggcgcacaatgcctgatgcgacgcttgacgcgtcttatcaggcctacaagtctgtgccgaaccgtaggccgtatccggcatgtcacaaatagagcgccggaaatatcaaccggctcaccccgcgcacctttaacgcatcagccaacggctcaacgtcttccggcgtggcgctcgcccagctttgcgcctcgccatacacgccgtgggcatgaaacgcgttcaggcgtaccggaacatcgccgagtcccttgataaacgccgccagttcttcgatgtgttgcaaataatccacctggccagggatcaccagcaaacgcagttccgccagcttgccgcgctctgccagcaaatagatgctgcgcttaatctgctgattatcgcgtccggtgagttgttgatgacattcgctcccccacgctttgagatcgagcattgcgccgtcgcacaccgggagcaatttttcccagccggtttcgctcaacatgccgttactgtccaccagacaggtgagatggcgcagttgcggatcgtttttgatagcagtaaacagcgccaccacaaacggcagctgggtcgtggcttcaccgccactcaccgttatcccttcgataaacagcactgctttgcggacatggctaagcacttcgtccacgctcatggattgcgccatgggcgtggcatgttgcggacacctcttcaggcaggtatcacactgctcgcaaaccacagcgttccacaccactttgccgtcaacaatctgcaacgcctgatgcggacactgtggcacgcactccccacagtcattgcaacgtcccatcgtccacggattgtgacagtttttgcagcgcagattgcagccctgcaaaaacagagccagacgactgcctggcccgtcaacgcaggagaaggggataatcttactgactaaagcgcatctgctgttcatggcttatcacgcgcggctggcgttccagaatacgagtgttgcgtgcggcttcttcgcccagccaggtggtgttggtgcgtgaaccttcggcgcgatatttttctaaatccgacaaacgcaccatataaccggtaacgcgaaccagatcgttaccgctgacattggcggtaaattcacgcattccggctttaaaggcaccgaggcaaagctgtaccagtgcctgcgggttacgtttgatggtttcgtcgagcgtcagaatgtcgctgatgccggaataataataagcatgatgcggggcgacagtttgcagatgggtgatcggatctggctcatcgccatacggcaaacgcgcgcccggcgtggtgccgatatcggaactgatccccgactgtgcgtgtaacatggcgcgtttttgccagccatatttcacgggggtattggcgacaaactccgccagttgcgcgctgatgcgataacctacttcatttgcggcggcttctttaccgtagcgcgcggcaatcccttctttttcacacagcaagttaaccgcttccgccagcccatacatgccaaacattggcacaaaacgttcagggttaatcagcccttctttcaccaggaagctattctcaaagaagtgtgattgttgatagaggaattcacaccgcgcatcgatgatggcgatctgctgctggcagtagtgcggtagagtgcgcgtaaagaagtcatccagcgattcgctgcgctcggcaatggctttcaggttaaggcgtaccagcgtgctgccaccacccgccagcggcagtgagttgtaacagctcacaatcccgtagcccccttttgtgaaaattttatcatgcaccggaccgttggcgatgtgcggtttgctacattcacagatgttcttcgccacttccagcagcaggtcatcaggggtgatttcaggatcgtagataaaggtcaggttcggtgaaacctgcttcaactctgcatctgcacgtaagatcgcgcgggtaatgggcgaatcagacgggccgatattggcgtgcataaaggcgtctggcagggttctgtcgaggtaacgccagaaacgttttattcgaacatcgatctcgtcttgtgttataattctaacatacggttgcaacaacgcatccagttgccccaggtagaccggcatcgatgtgaccgacggtacgtggtggtaaagaatggtcagcagagagagtgcgtcatcaagatctttcgcgccttccagctccagccattcggaaccgttcgccagaaaacgggcgtaatcgggtaagacatagcgcggtttgtacggcgcatgaccttcaaacatatcgcagattacaccttcatccagcgcgcggcgggcttcggcaggaagctgtgggtaaggcagattgttttctgcttccagtgccagaaaatggcgcttctgctccgggctaagcactgggctggtgacaatttgctggcaacgttgttgcagtgcattttcatgagaagtgggcatcttcttttccttttatgccgaaggtgatgcgccattgtaagaagtttcgtgatgttcactttgatcctgatgcgtttgccaccactgacgcattcatttgaaagtgaattatttgaaccagatcgcattacagtgatgcaaacttgtaagtagatttccttaattgtgatgtgtatcgaagtgtgttgcggagtagatgttagaatactaacaaactcgcaaggtgaattttattggcgacaagccaggagaatgaaatgactgatctgaaagcaagcagcctgcgtgcactgaaattgatggacctgaccaccctgaatgacgacgacaccgacgagaaagtgatcgccctgtgtcatcaggccaaaactccggtcggcaataccgccgctatctgtatctatcctcgctttatcccgattgctcgcaaaactctgaaagagcagggcaccccggaaatccgtatcgctacggtaaccaacttcccacacggtaacgacgacatcgacatcgcgctggcagaaacccgtgcggcaatcgcctacggtgctgatgaagttgacgttgtgttcccgtaccgcgcgctgatggcgggtaacgagcaggttggttttgacctggtgaaagcctgtaaagaggcttgcgcggcagcgaatgtactgctgaaagtgatcatcgaaaccggcgaactgaaagacgaagcgctgatccgtaaagcgtctgaaatctccatcaaagcgggtgcggacttcatcaaaacctctaccggtaaagtggctgtgaacgcgacgccggaaagcgcgcgcatcatgatggaagtgatccgtgatatgggcgtagaaaaaaccgttggtttcaaaccggcgggcggcgtgcgtactgcggaagatgcgcagaaatatctcgccattgcagatgaactgttcggtgctgactgggcagatgcgcgtcactaccgctttggcgcttccagcctgctggcaagcctgctgaaagcgctgggtcacggcgacggtaagagcgccagcagctactaagtaagatgctttacgcctgatgcgctgcgcttatcaggcctacgagacgtatctacccgtaggccggataaggcgtagacgcatccggcaaaagccgcctcatactcttttcctcgggaggttaccttgtttctcgcacaagaaattattcgtaaaaaacgtgatggtcatgcgctgagcgatgaagaaattcgtttctttatcaacggtattcgcgacaacactatctccgaagggcagattgccgccctcgcgatgaccattttcttccacgatatgacaatgcctgagcgtgtctcgctgaccatggcgatgcgagattcaggaaccgttctcgactggaaaagcctgcatctgaatggcccgattgttgataaacactccaccggtggcgtcggcgatgtgacttcgctgatgttggggccgatggtcgcagcctgcggcggctatattccgatgatctctggtcgcggcctcggtcatactggcggtacgctcgacaaactggaatccatccctggcttcgacattttcccggatgacaaccgtttccgcgaaattattaaagacgtcggcgtggcgattatcggtcagaccagttcactggctccggctgataaacgtttctacgcgacccgtgatattaccgcaaccgtggactccatcccgctgatcaccgcctctattctggcgaagaaacttgcggaaggtctggacgcgctggtgatggacgtgaaagtgggtagcggcgcgtttatgccgacctacgaactctctgaagcccttgccgaagcgattgttggcgtggctaacggcgctggcgtgcgcaccaccgcgctgctcaccgacatgaatcaggtactggcctccagtgcaggtaacgcggttgaagttcgtgaagcggtgcagttcctgacgggtgaatatcgtaacccgcgtctgtttgatgtcacgatggcgctgtgcgtggagatgctgatctccggcaaactggcgaaagatgacgccgaagcgcgcgcgaaattgcaggcggtgctggacaacggtaaagcggcagaagtctttggtcgtatggtagcggcacaaaaaggcccgaccgacttcgttgagaactacgcgaagtatctgccgacagcgatgctgacgaaagcagtctatgctgataccgaaggttttgtcagtgaaatggatacccgcgcgctggggatggcagtggttgcaatgggcggcggacgccgtcaggcatctgacaccatcgattacagcgtcggctttactgatatggcgcgtctgggcgaccaggtagacggtcagcgtccgctggcggttatccacgcgaaagacgaaaacaactggcaggaagcggcgaaagcggtgaaagcggcaattaaacttgccgataaagcaccggaaagcacaccaactgtctatcgccgtatcagcgaataacggtatactgatctgatcatttaaatttgaagcactgagtacggagaacatatgaaacgtgcatttattatggtgctggactcattcggcatcggcgctacagaagatgcagaacgctttggtgacgtcggggctgacaccctgggtcatatcgcagaagcttgtgccaaaggcgaagctgataacggtcgtaaaggcccgctcaatctgccaaatctgacccgtctggggctggcgaaagcacacgaaggttctaccggtttcattccggcgggaatggacggcaacgctgaagttatcggcgcgtacgcatgggcgcacgaaatgtcatccggtaaagataccccgtctggtcactgggaaattgccggtgtcccggttctgtttgagtggggatatttctccgatcacgaaaacagcttcccgcaagagctgctggataaactggtcgaacgcgctaatctgccgggttacctcggtaactgccactcttccggtacggtcattctggatcaactgggcgaagagcacatgaaaaccggcaagccgattttctatacctccgctgactccgtgttccagattgcctgccatgaagaaactttcggtctggataaactctacgaactgtgcgaaatcgcccgtgaagagctgaccaacggcggctacaatatcggtcgtgttatcgctcgtccgtttatcggcgacaaagccggtaacttccagcgtaccggtaaccgtcacgacctggctgttgagccgccagcaccgaccgtgctgcagaaactggttgatgaaaaacacggccaggtggtttctgtcggtaaaattgcggacatctacgccaactgcggtatcaccaaaaaagtgaaagcgactggcctggacgcgctgtttgacgccaccatcaaagagatgaaagaagcgggtgataacaccatcgtcttcaccaacttcgttgacttcgactcttcctggggccaccgtcgcgacgtcgccggttatgccgcgggtctggaactgttcgaccgccgtctgccggagctgatgtctctgctgcgcgatgacgacatcctgatcctcaccgctgaccacggttgcgatccgacctggaccggtactgaccacacgcgtgaacacattccggtactggtatatggcccgaaagtaaaaccgggctcactgggtcatcgtgaaaccttcgcggatatcggccagactctggcaaaatattttggtacttctgatatggaatatggcaaagccatgttctgatggatttgggcggagcgttgactccgcctttgttatgtcacaaaaaggataaaacaatggctaccccacacattaatgcagaaatgggcgatttcgctgacgtagttttgatgccaggcgacccgctgcgtgcgaagtatattgctgaaactttccttgaagatgcccgtgaagtgaacaacgttcgcggtatgctgggcttcaccggtacttacaaaggccgcaaaatttccgtaatgggtcacggtatgggtatcccgtcctgctccatctacaccaaagaactgatcaccgatttcggcgtgaagaaaattatccgcgtgggttcctgtggcgcagttctgccgcacgtaaaactgcgcgacgtcgttatcggtatgggtgcctgcaccgattccaaagttaaccgcatccgttttaaagaccatgactttgccgctatcgctgacttcgacatggtgcgtaacgcagtagatgcagctaaagcactgggtattgatgctcgcgtgggtaacctgttctccgctgacctgttctactctccggacggcgaaatgttcgacgtgatggaaaaatacggcattctcggcgtggaaatggaagcggctggtatctacggcgtcgctgcagaatttggcgcgaaagccctgaccatctgcaccgtatctgaccacatccgcactcacgagcagaccactgccgctgagcgtcagactaccttcaacgacatgatcaaaatcgcactggaatccgttctgctgggcgataaagagtaattgtgtttcgctgcaaggcgattgccttgtgaagccggagcgggagactgctccggctttttagtatctattcatttttctctccagcttgaatattttcgctatacttttcagtgaaatgtgttaataaatctattcaagtatctattcacgaatctattcattaatgagcgagctgactgatcttttactgcaagggccgcgttctgccccggaattgcgccagcgtctggcaatcagtcaggcgacgttctcacgccttgttgccagagaagatcgggtgattcgctttggtaaagcacgggcaacgcgatatgcactgctgcgtccttatcgcggaattgagcgtattcccgtctggcgggtggacgataccggaaaggcgcataaattcgccgacatccggttgtgctggccgcagggaagttgtctggtaacaggcgcagatggcgacgaacagtggtttgatggtttgccctggtatttgaccgatctccgaccgcagggctttttagggcgcgcgtggggcaggaagttagccgcgcaactgaatctgactgatgatatacgtctctggcaggaagaagatgtgctctacgccctgaccgtatttaacggtgaatatactggcggttggttggtcggggaggggaattatcagcgatggattactgcacaacaccctgcggaaattcctctggatcaaaaactcacccattacgaacagctggcaagtgatgcactggcaggagaaattgtgggttcttctgcgggcggcgagcagccaaaatttacctactatgcacaaacgccgtcaggcaataaacatgtgttggtgaaattcaccgtaccacagcaaaccgcggtcagccaacgttggggtgacctgctaattgctgaatctattgccgcgcaaatcctgcgtgacggtgggatccacgccatcgagtcaacggtgcttgtaacaagtaacaggcaggtattcctcgaagcggaacgctttgactgcaaaggtaacgatggtcgcttgcctattgtgtcgctggaggcggtgcagagtgagtttatctcttctccgggatcgtggccgcaggcaatgcgccgtttgtgtgagcaacaacttgtcactcaccagagcgtggcgcaaacagaagtgatctgggcatttgggcgacttatcgccaacagcgatatgcacgcaggtaatttatcgttttatttatctgaaccgccatttgcgctgacgcccgtctacgacatgctgccgatggtctatgcaccaaacagcgctggaatgctgcgtgatgctgccattgaggtgaagtttgatcttaacgtcagtaaaagcgcttggttaacggcgatcccgctggcgcagcagttctggcaaacggtcgccagagatccgcgtatcagcgaggcgtttcgccacattgcgcaagaaatgccggaaaaaatccggcaaatcgaagagaaagttgcccgcatgggcgggtaactaccttacagcccccgccatccatgccgataactcccgtagctctttttcctgttccgggaagtcaaccaacagcgcttcgcactcctgttgcagcatatctgcgcggtacaggcagccttgcagtcgtccggcgagggcttccagcggcgcggggttgaggctgtcggtaaacacctgggcgcgggtgatatggcctttttcaacgtcgaaatgcagttccacgccgccccaggtaaagcgttcatccagcagatgcgagaatgccggagcctgaccgaagttccattcccagctactctggcgggcaaaggtttcggcgaagtttggcaagtctggcgttttgttcggggagatgatttccgcttccacgcgctcgccataatgggcgaaaaaggcctcggttatggcctcgcaaacctgctcatgggtgatccccggcaacagctcggtgaggttggtcacgcgggaacgtaccgacgtaatgcctttcgccgccagtttctttttatccggattgagatagtttgccaggcggctgaggtcggcattgagtagcaaggtgccgtggtggaagccgcgatctttggtttcgcgataggccgagcctgagactttgcggtcgccttcgacggttttcaccaccagatcgttacgtccggacgcttcggcgctgacgccgagcgcgttcagcgcattgagcacaatcgacgtggagatagttttatcgtactccggcttgccagccataaaggtaaagcaggtattgccgagatcgtggaacaccgcgccgccaccgctactgcgccgcgccaggcggacgttatcttcttccatccgccgggtattacactctttccacgggttctgcgcgcgaccaattactaccgtgtcggcattgcgccagagaaacagaacgcgctgcgtggcgggcatttggcgaaaaatacactcttccaccgccaggttaaaccacgggtcgtaagagtcagagatgagcaggcgtaatgtggacataacgatttcctttcttgtagtaatgggtcactcttttttctcgctttcttcctcttccggcaccggtttgctggcggttaacaggaagggcgattgctgccagcgggtgcgtttaccctgtagcagcgtgcgggtcagcactacaccgattgccagtgagagcagcaacatcaggcgtaaaatgttagtggtgttatccacctgttgggcttcggtggcgagcgtatgggtgtcgagtgtcaggcgcagatagccgagcggtccgtttttacccgcaattggctcgacaatctgctggttaaaatagccgcctgcttttttaccgtcgagcgccagccggtcgcgcacttcgacgctttcgccagaacgtgcgataagatcgccttgttcgtcatacacacccgcgtcgaggatacggctttcatccgttaactgatcgaggatcgcctgaatgcgtttttcatccggtgagtcggtacgcatcagcggtgcaacgttcagcgtcacctgacgcgccagggtgcgggccagttcttccagctgtggattacgctgtcgctggtggttttgactaaaccatgacgctccctgcatcagcgccactaacaaggcaagacagaacaggacaatcactgcccgatgcagccggaatttcagttttgtgcgagccatcttccaccctttgaaaatttgagacttaatgttgccagaagcaatggatacaaggtagcctcatgcgttattttccctgcttcgaacgattttacaggagccttaatgcctaacattacctggtgcgacctgcctgaagatgtctctttatggccgggtctgcctctttcattaagtggtgatgaagtgatgccactggattaccacgcaggtcgtagcggctggctgctgtatggtcgtgggctggataaacaacgtctgacccaataccagagcaaactgggtgcggcgatggtgattgttgccgcctggtgcgtggaagattatcaggtgattcgtctggcaggttcactcaccgcacgggctacacgcctggcccacgaagcgcagctggatgtcgccccgctggggaaaatcccgcacctgcgcacgccgggtttgctggtgatggatatggactccaccgccatccagattgaatgtattgatgaaattgccaaactggccggaacgggcgagatggtggcggaagtaaccgaacgggcgatgcgcggcgaactcgattttaccgccagcctgcgcagccgtgtggcgacgctgaaaggcgctgacgccaatattctgcaacaggtgcgtgaaaatctgccgctgatgccaggcttaacgcaactggtgctcaagctggaaacgctgggctggaaagtggcgattgcctccggcggctttactttctttgctgaatacctgcgcgacaagctgcgcctgaccgccgtggtagccaatgaactggagatcatggacggtaaatttaccggcaatgtgatcggcgacatcgtagacgcgcagtacaaagcgaaaactctgactcgcctcgcgcaggagtatgaaatcccgctggcgcagaccgtggcgattggcgatggagccaatgacctgccgatgatcaaagcggcagggctggggattgcctaccatgccaagccaaaagtgaatgaaaaggcggaagtcaccatccgtcacgctgacctgatgggggtattctgcatcctctcaggcagcctgaatcagaagtaattgctcgcccgccatcctgcgggcggcacagcattaacgaggtacaccgtggcaaaagctccaaaacgcgcctttgtttgtaatgaatgcggggccgattatccgcgctggcaggggcagtgcagtgcctgtcatgcctggaacaccatcaccgaggtgcgtcttgctgcgtcgccaatggtggcgcgtaacgagcgtctcagcggctatgccggtagcgccggggtggcaaaagtccagaaactctccgatatcagccttgaagagctgccgcgtttttccaccggatttaaagagttcgaccgcgtactaggcggcggcgtggtgccaggaagtgccattctgattggcggtaaccctggtgcggggaaatccacgctgctactgcaaacgctgtgcaaactggcccagcagatgaaaacgctgtatgtcaccggcgaagagtcgctgcaacaggtggcaatgcgcgctcatcgccttggcctgccgactgacaatctcaatatgttgtcggaaaccagcatcgaacagatctgcctgattgccgaagaagagcaaccgaagctgatggtaattgactcgatccaggtgatgcatatggcggatgtacagtcatcgcctggtagcgtggcgcaggtgcgtgaaacggcggcttatttgacacgcttcgccaaaacgcgcggtgtggcgattgtcatggtggggcacgtaaccaaagatggttcgctggctggcccgaaagtgctggaacactgtatcgactgttcggtgcttttggatggcgatgccgactcccgttttcgcaccttgcgcagccataaaaaccgcttcggcgcggtgaatgagctgggcgtcttcgcgatgaccgaacaggggctgcgtgaagtcagcaacccttcggcaattttcttaagtcgcggcgatgaagtgacctccggtagctcagtgatggtggtatgggaaggaacgcgtccactgctggtggagattcaggcgctggtcgatcactcgatgatggcgaacccacgccgcgtggcagtggggctggaacaaaaccgtctggcaatcctgctggctgtgttgcaccgtcacggtggtctgcaaatggccgatcaggatgtgtttgtgaacgtggtcggcggcgtgaaggtaaccgaaaccagtgccgacttagcgttactgctggcgatggtttccagcctgcgcgacagaccgctgccgcaggatctggtggtgtttggtgaagtcgggctggcaggggagatccgcccggtgcccagcggtcaggaacgaatctctgaagcggcgaaacacggttttcgccgggcgattgttccggcggctaacgtgccgaaaaaagcgccggaagggatgcagatttttggcgttaaaaaactctccgacgcgcttagcgtgttcgacgacttataatgagatatacggagggagatatgtcgtcatttgattacctgaaaactgccatcaagcaacagggctgcacgctacagcaggtagctgatgccagcggtatgaccaaagggtatttaagccagttactgaatgccaaaatcaaaagccccagcgcgcaaaagctggaggcgttgcaccgttttttggggcttgagtttccccggcagaagaaaacgatcggtgtcgtattcggtaagttctacccactgcataccggacatatctaccttatccagcgcgcctgtagccaggttgacgagctgcatatcattatgggttttgacgatacccgtgaccgcgcgttgttcgaagacagtgccatgtcgcagcagccgaccgtgccggatcgtctgcgttggttattgcaaacttttaaatatcagaaaaatattcgcattcatgctttcaacgaagagggcatggagccgtatccgcacggctgggatgtgtggagcaacggcatcaaaaagtttatggctgaaaaagggatccagccggatctgatctacacctcggaagaagccgatgcgccacagtatatggaacatctggggatcgagacggtgctggtcgatccgaaacgtacctttatgagtatcagcggtgcgcagatccgcgaaaacccgttccgctactgggaatatattcctaccgaagtgaagccgttttttgtgcgtaccgtggcgatccttggcggcgagtcgagcggtaaatccaccctggtaaacaaacttgccaatatcttcaacaccaccagtgcgtgggaatatggccgcgattatgtcttttcacacctcggcggtgatgagatcgcattgcagtattctgactacgataaaatcgcgctgggccacgctcaatacattgattttgcggtgaaatatgccaataaagtggcatttatcgataccgattttgtcaccactcaggcgttctgcaaaaagtacgaagggcgggaacatccgttcgtgcaggcgctgattgatgaataccgtttcgatctggtgatcctgctggagaacaacacgccgtgggtggcggatggtttacgcagcctcggcagttcggtggatcgcaaagagttccagaacttgctggtggagatgctcgaagagaacaatatcgaatttgtgcgggttgaagaggaagattacgacagtcgtttcctgcgctgcgtggaactggtgcgggagatgatgggggagcagagataaccgtgatgaaactgctcaaaggcgaggtataaaatgagtttttttgatgagttgaaaacctctctggaagaggctgtcgagattaaacaaggtttgaaaaaacctgcacgggtgacccgccacgaaattgaggatgctaaggctgttgtagaccggaaacggtgttcacgccgcatccggcattcggtgctcaatgcctgatgcgacgcttaccgcgtcttatcaggcctacagttttacaacgtattgaaattgctggttttgtaggccggataaggcgttcgcgccgcatccggcattttacgcattacttcgcaatacgcttgtacttgatacgcttcggctccagcgcgtctgcgcccagcgtgcgtttcttgtactcttcgtactcggtaaagttaccttcgaagaactcaactttaccttcatcctggtaatccagaatgtgcgtggcgatacggtcgaggaaccaacggtcgtgcgagataaccatcgcacagcccgggaactccagcagggcgttttccagcgcgcgcagggtttcgatatccaggtcgttggttggttcgtcgagcagcagcatgttgccgccaacctgcagcagcttcgccagatgcagacgaccgcgctcaccaccggagagttcaccaacgcgtttaccctgatcaacccctttaaagttaaagcggccaacgtaggcgcggcttggcatctcggtgttgccgatcttcatgatatccagcccgccggaaacttcttcccaaacggttttgctgttatccattgagtcacggaactgatcaaccgacgccagtttcaccgtttcacccaaagtgatggtgccgctgtccggctgttcctgaccagagatcatacggaacagggtcgatttacccgcaccgttcggaccgatgatcccgacgatcgctcctttcgggatcgagaagctcaggtcatcaatcagcagacgatcgccataggatttacgcaggttgctgacttccagcactttatcgcccagacgcggtccaggtggaataaacagttcgttggtttcgttacgtttctgatattcggtgctgttcagttcttcaaagcgcgccagacgtgctttacctttcgactgacggcctttagtaccttgacgtacccattccagctctttctcaatcgacttacgacgcgccgcttcttgtgaagcttcctgcgccaggcgctgatctttctgctccagccaggaggagtagttaccttcccacggaataccttcaccgcggtcaagttcgaggatccagcctgcaacgttatcgaggaagtaacggtcgtgggtaatcgccacaacggtgccttcgaagtcgtgcaggaagcgttccagccaggccacggattcggcatccaggtggttggtcggttcgtcgagcagcagcatgtctggtttttccagcagcaggcggcacaacgctacgcgacgacgttcaccaccggagaggttagcgattttcgcgtcccagtccggcagacgtagcgcatccgccgcacgctccagctgtacgttcagattatgaccgtcgtgagcctgaatgatctcttccagacggccttgttcagcggccagcttgtcaaaatcggcatccggatcggcgtacagcgcatacacttcatccaggcgtttcagggcgttaaccacttctgaaaccgcttcttcaatggactcacgcacggtgtgttccgggttcagctgcggttcctgcggcagataaccaatcttgatgtctggctgcggacgcgcttcaccttcgatgtctttatcaatgcccgccataatgcgcagcagggtggacttacccgcgccattcagacccaggacaccaatttttgccccagggaagaaactcagagagatgtttttcaaaatatgacgtttcggcggaacaactttgccgacacgatgcatggtataaacgaattgagccacgttggacttcgcctctatgtttatcgtgataatgagttttcaaaggcgaagtgtagcctttttccccgcctaatcccagccggtcgatcaccctcgcagtaaaagtaaaaaagtgtccgtaacgtggcgtaaacggcaatgactggttagcataaatctattacgcggcatgacgctgcattgatgtatttacacttagaggatgcgcttgtggaaaaagccaaacaagttacctggcggctgttggctgccggtgtctgtctgctgacggtcagcagcgtggcgcgagccgactcactggatgagcagcgtagtcgttacgcgcaaatcaagcaggcctgggataatcgacaaatggatgtggtcgaacaaatgatgcctggactgaaggattatccgctttatccctacctggaataccgccagatcaccgatgatctgatgaatcaaccggcggtgacggtcactaactttgttcgcgctaaccccacgcttcctcccgctcgcacgctgcaatctcgtttcgtcaatgaactggcgcggcgtgaagactggcgtggcttgttagcctttagcccggaaaagcccggaactaccgaagcgcaatgtaattactactatgcgaaatggaacaccgggcagagtgaagaagcctggcaaggggcgaaagagctgtggctaaccggcaagagccagcctaacgcctgtgacaagttatttagcgtctggcgtgcgtcaggtaaacaagatccgctggcgtatttagagcgtatccgtctggcgatgaaagcgggtaacacaggcctggtaacagtgctggcagggcagatgcctgccgattaccagactatcgcctcggcaatcatttcactggcgaacaaccctaatacggtactgaccttcgcgcgtacaactggcgcgaccgattttacccgtcaaatggcggcggtggcgtttgccagtgtggcgcggcaggatgctgagaatgcacggctgatgatcccatcgcttgcccaggcgcagcagcttaatgaagatcagattcaggagctgcgcgatatcgtcgcctggcgtttgatgggcaacgatgtcaccgacgagcaggcgaaatggcgcgatgacgccattatgcgctcgcaatctacttcgcttattgaacgccgtgtacgaatggcgcttggcaccggcgatcgtcgcggcctgaatacctggctggcgcgtctgcctatggaagcgaaagagaaagatgaatggcgttactggcaggcggatttattgctggaacgcggacgtgaagctgaagcaaaagagattttgcatcaactcatgcaacagcgtggtttctacccgatggttgcagcacaacgcatcggcgaagagtatgagctgaagattgataaagcgccgcagaatgttgacagcgccctgactcaggggccggagatggcgcgcgtgcgcgagttgatgtactggaatctcgataataccgcgcgtagcgagtgggccaatctggtgaagagcaagtcaaaaacagagcaggctcaactggcgcggtatgctttcaacaaccaatggtgggatcttagcgttcaggcaacgatcgccgggaagctgtgggatcatctggaagagcgattcccgctggcttacaacgatcttttcaaacgctacaccagcggtaaggagatcccgcaaagctatgcgatggcgattgctcgtcaggagagcgcctggaatccgaaagtgaaatcaccggtaggggccagcggcttgatgcagattatgcctggtacagcgacccatacggtgaagatgttctctattcccggttatagcagtcctgggcaattgctggatccggaaacgaatatcaacattggcaccagttacctgcaatatgtttatcagcagtttggcaataatcgtattttctcctcagcagcttataacgccggaccagggcgggtgcgaacctggcttggcaacagcgccgggcgtatcgacgcagtggcatttgtcgagagtattccattctccgagacgcgcggttatgtgaagaacgtgctggcttatgacgcttactaccgctatttcatgggggataaaccgacgttgatgagcgccacggaatggggacgtcgttactgatccgcacgtttatgatatgctatcgtactctttagcgagtacaaccgggggaggcattttgcttcccccgctaacaatggcgacatattatggcccaacaatcaccctattcagcagcgatggcagaacagcgtcaccaggagtggttacgttttgtcgacctgcttaagaatgcctaccaaaacgatctccatttaccgttgttaaacctgatgctgacgccagatgagcgcgaagcgttggggactcgcgtgcgtattgtcgaagagctgttgcgcggcgaaatgagccagcgtgagttaaaaaatgaactcggcgcaggcatcgcgacgattacgcgtggatctaacagcctgaaagccgcgcccgtcgagctgcgccagtggctggaagaggtgttgctgaaaagcgattgattttgtaggcctgataagacgtggcgcatcaggcatcgtgcaccgaatgccggatgcggcgtgaacgccttatccgtcctacaaatacccgtaatttcaatatgtttggtaggcatgataagacgcggcagcgtcgcatcaggcgcttaatacacggcattatgaaacggactcagcgccaggatcaccgcctggtgatagacgctggcgcgagtgagtttcccggcggtaaacacgccgatcgccccttccttacgaccaatctcatcaataccggtataacgcgacatcacgggaccaagcgcctcaccttcacgcactttttccagaatcaccgcaggcaacggcaaagtagccgaacgcgcctcgccgcgctggctggcgttttcaatcaccacccaactgaaagtgctgtcaccatcgatgccagcttcaatcgccacccaaaaatcagcctctggaagtaaacggcgggcattggctacccgatttcgtgcgccagcgcgcgtttcctcactgccaaagggctgttccggtacaccgctctcgacggcaacggatgcaatatggcaggatccttcgccgaagatctcgtgaaatgcctgcagaatggcctgaattttagcgggattggtggtcgcacagacaacttggtgcataatcagcattactcagaaaattaacgttacagcagtatacggaaaaaaagcatgttacaggtatacctagtccgccacggtgaaacgcagtggaacgccgagcgacgtattcagggccagtctgacagcccgctgaccgccaaaggtgagcaacaggcgatgcaggtggcaacccgtgccaaagagcttggcattacgcatatcatcagtagcgatttaggacgcacccggcgtacggcggaaatcatcgcccaggcctgcggctgtgacatcatctttgattctcgcctgcgtgaattaaacatgggtgtgctggaaaaaagacatatcgattctctgaccgaagaagaagagaactggcgtcggcagctggtcaatggcaccgttgacgggcgtattcctgaaggcgagtcaatgcaggagctcagcgatcgcgtcaatgcggcactggaatcttgccgggacttaccgcagggaagccgaccgctgctggtgagtcatggtattgcactgggatgcctggtgagtacgattctcggattaccagcatgggcagagcgccgcttacgtctgcgtaactgttctatttcgcgcgtggattatcaggaaagcctgtggctggcgtctggctgggtcgttgaaaccgcaggggacatctcgcatctggacgcccctgcattagatgagctgcagcgttaacgacggatcggaatcagcagttcacagcgtagattaattgggcgatctcccgctttggcatcttctgccgggtagtatcgctcaatatcctgacctttacggcgcgtcaggttgagcattggcatgcacgttccgtataccgtcaggataaactcctgcacgccggttcccagaccttcataggtaaacatcacatattcgccgccctgcagcatcaccggatgccccgtcagtacatagccatctgcctgatcctgggctaacgcggtggtatagaatacctcttgctcgtcgtctttatcctgactcggacgcgtttcattcaggccgtagagcaccggcggaatggtcggcgcgttgccgagaaaatcgtgccagaactgataacgcatttcatggcggaaatcagagatttgctccagcgaacaggagtagctctgggtaacaccaatcagcggcgtatcttccagggtgacaaatttgtgctctggcatagtgaattcacccaggcgtagcggcgggcgaataccaaaggcgctccattcaggagaacggcggtaaagtgcaggagtctgggcaaactgcttcttgaatgcgcgggtaaatgtctgttgagagtcgaagcggtattgcagcgcgatgtccagaatcggacgcgcagtcaggcgtagtgcgaccgccgatttcgacaaacgacgagcacgaatatacgcgccaatagcatggccagtgacatctttaaacattctctgtaagtgccacttggaataacctgctttcgccgctacattgtcgagcgacaggggctgatccagatgaccttccagccagattaaaaggtcgcgaataatgccggcctgatccataaaatatcctcatcctttcaacaacgagcacctgacatcaggtaattggataatagcattttttgctgttttagcattcagtgtttttttcttagtagagtatgttttagggcttgacggaaataaaagtattgagattttgttcttaatcaatatgttatttaccgtgacgaactaattgctcgtgtaatagataaaaatggtaacaatatgaaatacaagcatttgatcctgtctttaagcctgataatgctggggccattggctcatgcagaagagattggttcggtcgacaccgtatttaaaatgatcggcccggatcacaaaattgttgtggaagcctttgatgatcccgatgtgaaaaatgtcacctgttatgtgagccgggcgaaaaccggtggtattaaagggggattgggtctggcggaagatacctccgatgcggccatttcttgtcagcaagtcgggccgattgaactgtcggatcgtattaaaaacggcaaagctcagggcgaggtagtattcaaaaaacgcacgtccctggtctttaagtcgttacaggtcgtgcgcttttatgatgccaaacgcaacgcgctcgcttatctggcttactccgacaaagttgtagaaggttcgccgaaaaacgcgattagcgcggttcctgtcatgccgtggcggcaataacagaggcgatttatgcaacgggaaacggtctggttagtggaagatgagcaagggatagccgacacgctggtctacatgttgcagcaggaaggttttgccgtcgaggtctttgagcgaggcttgccggtgctggataaagctcgcaagcaggtacccgacgtcatgattctcgatgttggtctgccggatattagcggctttgaattgtgccgccagttactggcgctccatccggcgttacctgtactgttcctgacggcccgaagtgaagaggtcgatcgcctgcttgggctggaaattggtgctgacgactacgtggctaaaccgttttcaccccgcgaagtgtgcgccagggtgcgcaccttactgcgtcgggtgaagaagttctcgacgccgtctcccgtcatccgtattggacattttgaattgaatgaacccgcggcgcagatcagctggtttgacacgccattagcgctgactcggtatgagtttttattgttgaagacgttactcaagtcaccgggccgcgtctggtcccgccagcaactgatggatagcgtatgggaagatgcgcaggacacctacgatcgcaccgtcgatacccacattaaaacgctgcgtgccaagctgcgcgccatcaaccccgatctttcaccgattaatactcatcgcggcatgggatatagcctgaggggcctgtaatgcgtatcggcatgcggttgttgctgggctattttttactggtggcggtggcagcctggttcgtactggccatttttgtcaaagaagttaaaccgggcgtgcgaagagcaacggaggggacgttgatcgacaccgcaacgttgctggcggagctggcgcgtcccgatttgctctctggggacccaacgcatgggcaactggcgcaggcgtttaatcagctacaacatcgcccgtttcgcgccaatatcggtggcattaacaaagtgcgcaatgaatatcatgtctatatgaccgatgcgcagggcaaagtattgttcgattcggcaaataaagccgttggacaggattattcgcgctggaatgacgtctggctaacgttgcgtggtcagtatggtgcgcgcagcacgttgcaaaatcctgccgatcccgaaagttctgtgatgtatgttgccgcaccgattatggacggctcgcggcttattggcgttttgagcgtaggcaaaccgaacgcggcgatggctccggtcattaagcgtagcgagcggcgaattttatgggccagcgccattttgttggggattgcactggtgattggcgcaggcatggtttggtggatcaaccgctctattgcccggctcactcgctatgctgattccgtcactgacaataagcccgttcctctccccgatctcggtagtagcgagttgcgtaaactcgcgcaggcgctggaaagtatgcgcgtgaagctggaagggaaaaactatattgagcagtatgtttacgcattaactcatgagctaaaaagcccactggcggcgattcgtggagcggcggaaattttacgcgaaggtccgccgccggaagtggtggctcgttttactgacaacattctgacgcaaaatgcgcgtatgcaggcattggtagaaacgttactacgccaggcaagactggagaatcgtcaggaagtcgttctgactgctgttgatgtggcggcattattccgccgcgtcagcgaagcgcgcaccgtgcagttggcagaaaaaaaaatcactctgcatgttacgcccaccgaggttaacgttgctgctgaaccggcgttactggagcaggcgctgggaaatttactggataacgccatcgattttacccccgagagcggttgcatcacgctaagcgccgaagtggatcaggaacacgtcacgcttaaggtgctggataccggtagtggtattcctgactacgcgctttcacgtatttttgaacgcttttactctttgcctcgtgcaaatgggcaaaaaagcagcggtctggggttggcgttcgtcagtgaggtcgcccgtttgtttaacggcgaagtcacgctgcgcaacgtgcaggaaggtggcgtgctggcctcgcttcgacttcaccgtcacttcacatagcttcaaattcttcccacatagtcttcgtatcctgctgccattgcaaaggagaagactatgttgaaatcccccctgttctggaaaatgactagcctgtttggtgcagtattgctgttgttgattccgataatgctgattcggcaggtgattgtcgaacgtgctgattaccgtagcgatgtggaagatgcgattcgccaaagtaccagcgggccgcaaaaactcgttgggccgctcatcgctattcctgtgaccgagctttatacggtgcaggaagaggataaaaccgtggagcggaaacgaagttttatccatttttggttacctgagtcattgatggttgatggcaatcagaacgtggaagaacgcaagatagggatttataccggtcaggtctggcacagtgatttaacgttaaaagccgatttcgatgtttcgcgtcttagcgaactcaacgcgccaaatatcaccttaggcaagccatttattgtgattagcgtcggggatgcgcgtggtattggtgtggtgaaagcgcctgaagttaacggaacggcgctgaccattgaacccggcaccgggttagagcaaggcgggcagggcgtgcatatccctttacctgaaggggactggcggaagcagaacctgaagctgaatatggccctgaatttaagcggtaccggcgatctttctgtggtgcctggcgggcgtaatagcgaaatgaccttaaccagcaactggccgcatcccagttttttaggtgattttctaccagccaaacgggaagttagcgagtcaggttttcaggcgcactggcaaagcagctggtttgctaataatctcggtgagcgttttgcttcaggcaatgataccggctgggaaaacttcccggcgtttagcgtcgcagtaacgacgccagccgatcaataccaattaactgaccgggcgactaagtacgccattctgctgattgcactgacttttatggcgttctttgtttttgaaacgctcaccgcgcaacgtttacacccaatgcaatatttgctggtggggctttcattggtgatgttttatttgctcttgctggcgctttctgaacataccggttttaccgtggcatggataatcgccagtctgattggggcgataatgaacggtatttatttgcaagcggtattgaaaggttggtgcaacagcatgttgtttaccctcgcgctgttgttgctggatggtgtgatgtggggactgctcaactctgccgatagcgcgctgttgttgggaaccagtgtgctggtggtggcgctggccggcatgatgtttgtgacccgtaatatcgactggtatgcgttttcactgccgaaaatgaaagccagtaaagaagttacaacggacgatgagttacgtatctggaaataaggttgaaaaataaaaacggcgctaaaaagcgccgttttttttgacggtggtaaagccgattaatcttccagatcaccgcagaagcgataaccttcaccgtgaatggtggcgatgatttccggcgtatccggcgtagattcgaaatgtttacgaatacggcggatcgtcacgtctacagtacggtcgtgcggtttcagctcacggccggtcattttcttcagcagttcagcacgggactgaattttgcctgggttttcacagaagtgaagcatggcgcggaactcgctgcgcggcagcttgtactgctcgccatcagggccgatcaacgaacggctgttgatgtccagttcccaaccattgaacttgtagctttcaacgctacgacgttcttcgctgacagtacccagattcatggtacgggacagtaggttgcgtgcacgaatcgtcagttcacgcgggttgaacggtttggtgatgtagtcatctgcaccgatttcgaggccgagaattttatcgacttcgttgtcacggccagtcaggaacatcaacgcaacattcgcctgctcgcgcagttcacgcgctaacagaagaccgttcttacccggcagattgatatccatgatcaccaggttgatgtcatattcagagaggatctgatgcatttccgcgccatctgtcgcttcgaaaacatcatagccttccgcttcgaaaatacttttcaacgtgttgcgtgttaccaactcgtcttcaacgataagaatgtgcggggtctgcatgtttgctacctaaattgccaactaaatcgaaacaggaagtacaaaagtccctgacctgcctgatgcatgctgcaaattaacatgatcggcgtaacatgactaaagtacgtaattgcgttcttgatgcactttccatcaacgtcaacaacatcattagcttggtcgtgggtactttccctcaggacccgacagtgtcaaaaacggctgtcatcctaaccattttaacagcaacataacaggctaagaggggccggacacccaataaaactacgcttcgttgacatatatcaagttcaattgtagcacgttaacagtttgatgaaatcatcgtatctaaatgctagctttcgtcacattattttaataatccaactagttgcatcatacaactaataaacgtggtgaatccaattgtcgagatttattttttataaaattatcctaagtaaacagaaggatatgtagcattttttaacaactcaaccgttagtacagtcaggaaatagtttagccttttttaagctaagtaaagggctttttctgcgacttacgttaagaatttgtaaattcgcaccgcgtaataagttgacagtgatcacccggttcgcggttatttgatcaagaagagtggcaatatgcgtataacgattattctggtcgcacccgccagagcagaaaatattggggcagcggcgcgggcaatgaaaacgatggggtttagcgatctgcggattgtcgatagtcaggcacacctggagccagccacccgctgggtcgcacatggatctggtgatattattgataatattaaagttttcccgacattggctgaatcgttacacgatgtcgatttcactgtcgccaccactgcgcgcagtcgggcgaaatatcattactacgccacgccagttgaactggtgccgctgttagaggaaaaatcttcatggatgagccatgccgcgctggtgtttggtcgcgaagattccgggttgactaacgaagagttagcgttggctgacgttcttactggtgtgccgatggtggcggattatccttcgctcaatctggggcaggcggtgatggtctattgctatcaattagcaacattaatacaacaaccggcgaaaagtgatgcaacggcagaccaacatcaactgcaagctttacgcgaacgagccatgacattgctgacgactctggcagtggcagatgacataaaactggtcgactggttacaacaacgcctggggcttttagagcaacgagacacggcaatgttgcaccgtttgctgcatgatattgaaaaaaatatcaccaaataaaaaacgccttagtaagtatttttc

SEQ ID NO: 256 - protein, 16 aa, Escherichia coli
AADGQMVPFSAFSSSR

SEQ ID NO: 257 - protein, 30 aa, Escherichia coli
AQALGVSINDINTTLGAAWGGSYVNDFIDR

SEQ ID NO: 258 - protein, 18 aa, Escherichia coli
AQNAQVAAGQLGGTPPVK

SEQ ID NO: 259 - protein, 18 aa, Escherichia coli
DWADRPGEENKVEAITMR

SEQ ID NO: 260 - protein, 13 aa, Escherichia coli
FQLTPVDVITAIK

SEQ ID NO: 261 - protein, 8 aa, Escherichia coli
GFFGWFNR

SEQ ID NO: 262 - protein, 11 aa, Escherichia coli
GLIEATLDAVR

SEQ ID NO: 263 - protein, 12 aa, Escherichia coli
GQNTGIAFVSLK

SEQ ID NO: 264 - protein, 20 aa, Escherichia coli
HPDMLTSVRPNGLEDTPQFK

SEQ ID NO: 265 - protein, 12 aa, Escherichia coli
IVYPYDTTPFVK

SEQ ID NO: 266 - protein, 10 aa, Escherichia coli
IWMNPNELNK

SEQ ID NO: 267 - protein, 15 aa, Escherichia coli
LATGANALDTAAAIR

SEQ ID NO: 268 - protein, 17 aa, Escherichia coli
LPTGVGYDWTGMSYQER

SEQ ID NO: 269 - protein, 21 aa, Escherichia coli
LQLAMPLLPQEVQQQGVSVEK

SEQ ID NO: 270 - protein, 10 aa, Escherichia coli
MEPFFPSGLK

SEQ ID NO: 271 - protein, 12 aa, Escherichia coli
MLPDDIGDWYVR

SEQ ID NO: 272 - protein, 10 aa, Escherichia coli
NAILIVEFAK

SEQ ID NO: 273 - protein, 17 aa, Escherichia coli
NNVESVFAVNGFGFAGR

SEQ ID NO: 274 - protein, 15 aa, Escherichia coli
STGEAMELMEQLASK

SEQ ID NO: 275 - protein, 17 aa, Escherichia coli
TSGVGDVQLFGSQYAMR

SEQ ID NO: 276 - protein, 7 aa, Escherichia coli
VEAITMR

SEQ ID NO: 277 - protein, 12 aa, Escherichia coli
VLNEVTHYYLTK

SEQ ID NO: 278 - protein, 10 aa, Escherichia coli
VMAEEGLPPK

SEQ ID NO: 279 - protein, 8 aa, Escherichia coli
VYVMSEAK

SEQ ID NO: 280 - protein, 7 aa, Escherichia coli
WEYGSPR

SEQ ID NO: 281 - protein, 17 aa, Escherichia coli
YNGLPSMEILGQAAPGK

SEQ ID NO: 282 - protein, 17 aa, Escherichia coli
ASGYLQTLDDFNHIVLK

SEQ ID NO: 283 - protein, 13 aa, Escherichia coli
DRDMVSVVHDLQK

SEQ ID NO: 284 - protein, 7 aa, Escherichia coli
HDLADLR

SEQ ID NO: 285 - protein, 10 aa, Escherichia coli
IIEELDNTVR

SEQ ID NO: 286 - protein, 12 aa, Escherichia coli
LAQYGISLAEVK

SEQ ID NO: 287 - protein, 12 aa, Escherichia coli
LDEALYHGAVLR

SEQ ID NO: 288 - protein, 9 aa, Escherichia coli
LFGPLAFTK

SEQ ID NO: 289 - protein, 13 aa, Escherichia coli
LPGLANLWVPPIR

SEQ ID NO: 290 - protein, 9 aa, Escherichia coli
QLPILTPMK

SEQ ID NO: 291 - protein, 12 aa, Escherichia coli
QQITLADVADIK

SEQ ID NO: 292 - protein, 8 aa, Escherichia coli
SLQDWFLK

SEQ ID NO: 293 - protein, 16 aa, Escherichia coli
TIPDVAEVASVGGVVK

SEQ ID NO: 294 - protein, 12 aa, Escherichia coli
TVPGVASALAER

SEQ ID NO: 295 - protein, 11 aa, Escherichia coli
VLEYLNQVQGK

SEQ ID NO: 296 - protein, 11 aa, Escherichia coli
GTAKPDPAVMK

SEQ ID NO: 297 - protein, 9 aa, Escherichia coli
LPSAIILQR

SEQ ID NO: 298 - protein, 18 aa, Escherichia coli
AEFPRPQAFPNWQTLELR

SEQ ID NO: 299 - protein, 15 aa, Escherichia coli
EFYQVLLPLMQEMGK

SEQ ID NO: 300 - protein, 8 aa, Escherichia coli
ILDTHVER

SEQ ID NO: 301 - protein, 30 aa, Escherichia coli
LFSAVFTDVWLFDQLLGPEGKPANPQLVEK

SEQ ID NO: 302 - DNA, 43 bp, synthetic construct
  source 1..43: mol_type = other DNA
gatcgccattatcatcatgtgttttagagctagaaatagcaag

SEQ ID NO: 303 - DNA, 44 bp, synthetic construct
  source 1..44: mol_type = other DNA
acatgatgataatggcgatcactagtattatacctaggactgag

SEQ ID NO: 304 - DNA, 102 bp, synthetic construct
  source 1..102: mol_type = other DNA
ttgcgccaccggcagtttgaggatcgcttattattaatttaacatgatgataatggcgatcacccacgcaaaaatcgggcgatcgataaagaaattaggcat

SEQ ID NO: 305 - DNA, 43 bp, synthetic construct
  source 1..43: mol_type = other DNA
ccagcacccaggcaaaaatggttttagagctagaaatagcaag

SEQ ID NO: 306 - DNA, 44 bp, synthetic construct
  source 1..44: mol_type = other DNA
catttttgcctgggtgctggactagtattatacctaggactgag

SEQ ID NO: 307 - DNA, 96 bp, synthetic construct
  source 1..96: mol_type = other DNA
ttgttcaacgggcaatgaaaaaatcgccagggtacctgtcagttattattaattcagcacccaggcaaaaattcgatcaataaagaaattcgccat

SEQ ID NO: 308 - DNA, 43 bp, synthetic construct
  source 1..43: mol_type = other DNA
tcgacgaccgatatttgcatgttttagagctagaaatagcaag

SEQ ID NO: 309 - DNA, 44 bp, synthetic construct
  source 1..44: mol_type = other DNA
atgcaaatatcggtcgtcgaactagtattatacctaggactgag

SEQ ID NO: 310 - DNA, 102 bp, synthetic construct
  source 1..102: mol_type = other DNA
ctgagcgacgggcaattgtaggatcgccagtgcgcccgccatcatcagaatttattattaatttcatgcaaatatcggtcgtcgaataaaaaagtttgccat

SEQ ID NO: 311 - DNA, 43 bp, synthetic construct
  source 1..43: mol_type = other DNA
attattatgatgcttgcagggttttagagctagaaatagcaag

SEQ ID NO: 312 - DNA, 44 bp, synthetic construct
  source 1..44: mol_type = other DNA
cctgcaagcatcataataatactagtattatacctaggactgag

SEQ ID NO: 313 - DNA, 105 bp, synthetic construct
  source 1..105: mol_type = other DNA
aatctgcggatactgcgcaaccggtaagttcatttattattaattacctgcaagcatcataataatggcaagtacccaggcaaaaaccgggcgatcaataaaata

SEQ ID NO: 314 - DNA, 43 bp, synthetic construct
  source 1..43: mol_type = other DNA
attcgtcgcagctatcctgcgttttagagctagaaatagcaag

SEQ ID NO: 315 - DNA, 44 bp, synthetic construct
  source 1..44: mol_type = other DNA
gcaggatagctgcgacgaatactagtattatacctaggactgag

SEQ ID NO: 316 - DNA, 102 bp, synthetic construct
  source 1..102: mol_type = other DNA
acccgcataaatatcgaggctgatgcccttcagcacctcaacttattattaattggcaggatagctgcgacgaatatcctttaattcgagcaaaggcgtcat

SEQ ID NO: 317 - DNA, 43 bp, synthetic construct
  source 1..43: mol_type = other DNA
ggactccaccattgctaacggttttagagctagaaatagcaag

SEQ ID NO: 318 - DNA, 44 bp, synthetic construct
  source 1..44: mol_type = other DNA
cgttagcaatggtggagtccactagtattatacctaggactgag

SEQ ID NO: 319 - DNA, 105 bp, synthetic construct
  source 1..105: mol_type = other DNA
ctggctgagcgatgagcccagattcccggcgatttattattaattaacgttagcaatggtggagtccagcacctgcatgaatgtcgccagtgacagcgcaatcgt

SEQ ID NO: 320 - DNA, 43 bp, synthetic construct
  source 1..43: mol_type = other DNA
ggcgggataaagtaaaaccagttttagagctagaaatagcaag

SEQ ID NO: 321 - DNA, 44 bp, synthetic construct
  source 1..44: mol_type = other DNA
tggttttactttatcccgccactagtattatacctaggactgag

SEQ ID NO: 322 - DNA, 99 bp, synthetic construct
  source 1..99: mol_type = other DNA
attgagatcggcggcgatgcgcggtaaaccaacgaggtattattattaattggcgggataaagtaaaaccagaaaactacaaatcaaaaagcgggacat

SEQ ID NO: 323 - DNA, 43 bp, synthetic construct
  source 1..43: mol_type = other DNA
ctatagtgccaccgacatgggttttagagctagaaatagcaag

SEQ ID NO: 324 - DNA, 44 bp, synthetic construct
  source 1..44: mol_type = other DNA
ccatgtcggtggcactatagactagtattatacctaggactgag

SEQ ID NO: 325 - DNA, 102 bp, synthetic construct
  source 1..102: mol_type = other DNA
accaaagaggatcgccggaagccagatagaagtaccttattattaattcatgtcggtggcactatagccgcccgccatcacggtatcgacaaaacccatcgc

SEQ ID NO: 326 - DNA, 43 bp, synthetic construct
  source 1..43: mol_type = other DNA
aatcgacagcggcatcaacagttttagagctagaaatagcaag

SEQ ID NO: 327 - DNA, 44 bp, synthetic construct
  source 1..44: mol_type = other DNA
tgttgatgccgctgtcgattactagtattatacctaggactgag

SEQ ID NO: 328 - DNA, 102 bp, synthetic construct
  source 1..102: mol_type = other DNA
cggtagcgcgggcagatacatatcaatcgacagcggcatcaacatttattattaattaaggataaaaacaatagcaaacgacgaatgctgtcgggtggtcac

SEQ ID NO: 329 - DNA, 20 bp, synthetic construct
  source 1..20: mol_type = other DNA
ccgtgatgttaccgactctc

SEQ ID NO: 330 - DNA, 20 bp, synthetic construct
  source 1..20: mol_type = other DNA
gtggcattgaagcgatctcc

SEQ ID NO: 331 - DNA, 43 bp, synthetic construct
  source 1..43: mol_type = other DNA
caacatgatgccgacctgaggttttagagctagaaatagcaag

SEQ ID NO: 332 - DNA, 44 bp, synthetic construct
  source 1..44: mol_type = other DNA
ctcaggtcggcatcatgttgactagtattatacctaggactgag

SEQ ID NO: 333 - DNA, 111 bp, synthetic construct
  source 1..111: mol_type = other DNA
cattagcgctactacccatgcgtaaatggtcaacatgatgccgacctgagcttattattaattttgcatgtgaaaactttgcgcaatgtcagagagcaggccaacagggac

SEQ ID NO: 334 - DNA, 43 bp, synthetic construct
  source 1..43: mol_type = other DNA
catcgggaaaaacagcgtgggttttagagctagaaatagcaag

SEQ ID NO: 335 - DNA, 44 bp, synthetic construct
  source 1..44: mol_type = other DNA
ccacgctgtttttcccgatgactagtattatacctaggactgag

SEQ ID NO: 336 - DNA, 96 bp, synthetic construct
  source 1..96: mol_type = other DNA
ctggatcagatccgtcgacagatacgcagcaaagtcatattattattaattcatcgggaaaaacagcgtggcatggcgggtaaaaaaacgtggcat

SEQ ID NO: 337 - DNA, 43 bp, synthetic construct
  source 1..43: mol_type = other DNA
ccacgccaaggatcatggcggttttagagctagaaatagcaag

SEQ ID NO: 338 - DNA, 44 bp, synthetic construct
  source 1..44: mol_type = other DNA
cgccatgatccttggcgtggactagtattatacctaggactgag

SEQ ID NO: 339 - DNA, 105 bp, synthetic construct
  source 1..105: mol_type = other DNA
gtcgtttaaccagacctgaattttaaccacgccaaggatcatggcgagttattattaatttaacaacactgaagttttattattcttacgcagccaaaagggctt

SEQ ID NO: 340 - DNA, 43 bp, synthetic construct
  source 1..43: mol_type = other DNA
aatatcgcaccgtatcgctggttttagagctagaaatagcaag

SEQ ID NO: 341 - DNA, 44 bp, synthetic construct
  source 1..44: mol_type = other DNA
cagcgatacggtgcgatattactagtattatacctaggactgag

SEQ ID NO: 342 - DNA, 102 bp, synthetic construct
  source 1..102: mol_type = other DNA
aataccaatcacaatggttaatatcgcaccgtatcgctgttattattaattgccgtcggcctgaacttttggcataggaattttatatctttggtgaataat

SEQ ID NO: 343 - DNA, 43 bp, synthetic construct
  source 1..43: mol_type = other DNA
gttggtatgcccgccgacgagttttagagctagaaatagcaag

SEQ ID NO: 344 - DNA, 44 bp, synthetic construct
  source 1..44: mol_type = other DNA
tcgtcggcgggcataccaacactagtattatacctaggactgag

SEQ ID NO: 345 - DNA, 25 bp, synthetic construct
  source 1..25: mol_type = other DNA
caacattaacgaattaaacaacccg

SEQ ID NO: 346 - DNA, 25 bp, synthetic construct
  source 1..25: mol_type = other DNA
caacattaacgaattaaacaacccg

SEQ ID NO: 347 - DNA, 111 bp, synthetic construct
  source 1..111: mol_type = other DNA
cacaccatcgtgcgtctcgatatgcacaatgttggtatgcccgccgacgattgtgacacacgcccacttctcaccgttccagactttggctcgagagaagaggatttcatc
